(19) United States
(12) Patent Application Publication
(10) Pub. No.: US 2010/0055702 A1
(43) Pub. Date: Mar. 4, 2010

(54) Pathogenecity Islands of Pseudomonas Aeruginosa

(75) Inventors: Scott E. Battle, Chicago, IL (US); Alan R. Hauser, Chicago, IL (US)

Correspondence Address: ANDRUS, SCEALES, STARKE & SAWALL, LLP, 100 EAST WISCONSIN AVENUE, SUITE 1100, MILWAUKEE, WI, 53202, US

(73) Assignee: Northwestern University, Evanston, IL (US)

(21) Appl. No.: 12/545,528

(22) Filed: Aug. 21, 2009

Related U.S. Application Data
(60) Provisional application No. 61/090,679, filed on Aug. 21, 2008.

(51) Int. Cl. C12Q 1/68; G01N 33/50

(52) U.S. Cl. 435/6; 436/94

(57) ABSTRACT

Disclosed are Pseudomonas aeruginosa Genomic Island nucleic acid sequences referred to as PAGI-5, PAGI-6, PAGI-7, PAGI-8, PAGI-9, PAGI-10, and PAGI-11. These nucleic acid sequences may be useful in methods for identifying virulent strains of Pseudomonas bacteria.

### CROSS-REFERENCE TO RELATED APPLICATIONS

[0001] The present application claims the benefit under 35 U.S.C. §119(e) to U.S. Provisional Application No. 61/090,679, filed on Aug. 21, 2008, the content of which is incorporated herein by reference in its entirety.

### STATEMENT REGARDING U.S. GOVERNMENT SPONSORED RESEARCH OR DEVELOPMENT

[0002] This invention was made with U.S. government support under grant Nos. K02 AI065615, F30-ES016487, and R01 AI075191 from the National Institutes of Health. The U.S. government has certain rights in this invention.

### BACKGROUND

[0003] The present invention relates generally to the field of Pseudomonas bacteria and methods for detecting virulent strains of Pseudomonas bacteria. In particular, the field relates to Pseudomonas aeruginosa and methods for detecting and assessing virulence strains thereof.

[0004] Pseudomonas aeruginosa is a medically important opportunistic pathogen that causes serious disease in hospitalized patients and individuals with cystic fibrosis (Fitzsimmons, 1993; Stryjewski et al., 2003). In the environment, it naturally inhabits lakes, streams, moist soil, and plant matter (Stryjewski, et al., 1974; Hoadley, 1977; Rhame, 1979) and has pathogenic activity against a wide spectrum of hosts, including mammals, worms, insects, fungi, amoebae, and plants (Alibaud et al., 2008; Glazebrook et al., 1978; Hogan et al., 2002; Jander et al., 2000; Mahajan-Miklos et al., 1999; Rahme et al., 1995).

[0005] Observations from clinical experience and a number of infectious models indicate that the virulence of P. aeruginosa varies from strain to strain (Lee et al., 2006; Roy-Burman et al., 2001; Schulert et al., 2003; Woods et al., 1997), although the mechanisms accounting for this variation are not completely understood. The genes of most of the characterized P. aeruginosa virulence determinants are located in the core genome and therefore present in all strains (Wolfgang et al., 2003). Thus, it is conceivable that varying expression of these conserved pathogenic factors is responsible for differences in virulence between P. aeruginosa strains. Alternatively, P. aeruginosa's accessory genome may contribute to the heterogeneity of virulence. The accessory genome consists of bacteriophages, plasmids, and genomic islands found in some strains but not in others. Genomic islands in particular have been the focus of much recent attention. These horizontally transferred segments of DNA are often integrated into tRNA genes, have G+C contents divergent from that of the host core chromosome, and include components of mobile genetic elements (Cheetham et al., 1995; Dobrindt et al., 2004; Lawrence, 2005; Reiter et al., 1989). When they encode virulence determinants, genomic islands are referred to as pathogenicity islands (Dobrindt et al., 2004).

[0006] One well-described example of a pathogenicity island contributing to strain-to-strain variation in P. aeruginosa virulence is the family of islands that carry the exoU gene (Kulasekara et al., 2006), which encodes the type III secretion effector protein ExoU (Finck-Barbancon et al., 1997; Hauser et al., 1998). The exoU gene is present in approximately one-third of isolates obtained from acute infections, and secretion of the ExoU toxin is a marker for strains with enhanced virulence (Schulert et al., 2003). It is likely that additional pathogenicity islands contribute to the especially virulent phenotypes of some P. aeruginosa strains. If this is indeed the case, then highly virulent strains should prove to be rich sources of these islands. The identification of novel pathogenicity islands is important because they likely encode novel virulence determinants that would increase our understanding of P. aeruginosa pathogenesis.

[0007] Pseudomonas aeruginosa is a ubiquitous environmental gram-negative bacterium that can be found in lakes, streams, soil, and plant matter (Green et al., 1974; Hoadley, 1977; Rhame, 1979). In addition to thriving in multiple environmental niches, P. aeruginosa can infect many different organisms, including yeast (Hogan & Kolter, 2002), the nematode Caenorhabditis elegans (Mahajan-Miklos et al., 1999), insects (Jander et al., 2000), plants (Elrod & Braun, 1942; Rahme et al., 1995), and mammals (Glazebrook et al., 1978; Hammer et al., 2003). In humans, it is considered an opportunistic pathogen and is a significant cause of both acute infections (e.g. hospital-acquired pneumonia, urinary tract infections, and wound infections) and chronic infections (e.g. respiratory infections in individuals with cystic fibrosis) (Stryjewski & Sexton, 2003).

[0008] Two aspects of P. aeruginosa's genome evidently allow it to exploit differing environmental niches and infect a broad range of host organisms. First, it has an c. 6.3 Mb genome (Stover et al., 2000), one of the largest among bacteria. Thus, it harbors a large amount of genetic material necessary for environmental versatility. Consistent with its ability to inhabit diverse niches, P. aeruginosa's large genome has one of the highest proportions of predicted regulatory genes observed among bacterial genomes—8.4% of all predicted genes (Stover et al., 2000). Second, the P. aeruginosa genome contains a large number of genomic islands. About 90% of the P. aeruginosa chromosome is conserved (Wolfgang et al., 2003), but inserted within this core genome are genomic islands, which are found in some strains but not in others (Schmidt et al., 1996). Genomic islands are segments of DNA acquired by horizontal transfer (Dobrindt et al., 2004; Lawrence, 2005). They are frequently integrated adjacent to tRNA genes, have a G+C content distinct from that of the host core chromosome, and contain components of mobile genetic elements (Reiter et al., 1989; Cheetham & Katz, 1995). (Although the term ‘genomic island’ usually implies a large region of DNA, here it refers to both large and small segments of integrated DNA.) In P. aeruginosa, genomic islands constitute an accessory genome that may account for 10% of an individual isolate's genetic material (Spencer et al., 2003; Shen et al., 2006) and are thought to contribute to the ability of some P. aeruginosa strains to inhabit extreme environments.

[0009] Although the conserved core genome of P. aeruginosa has now been characterized by the sequencing of several strains (Stover et al., 2000; Lee et al., 2006; Mathee et al., 2008), the wealth of genetic material present in genomic islands remains relatively unexplored. Studies performed to date have identified and characterized several islands. For example, a 49 kb island called P. aeruginosa genomic island 1 (PAGI-1) was identified in a urinary tract infection isolate and was found to be present in 85% of the clinical strains tested (Liang et al., 2001). The large genomic islands PAGI-2 and PAGI-3 were identified by sequencing a hypervariable region in two different strains: a cystic fibrosis lung isolate and an environmental aquatic isolate (Larbig et al., 2002). Pseudomonas aeruginosa pathogenicity island-1 (PAPI-1) is representative of a large family of genomic islands derived from an ancestral pKLC102-like plasmid. pKLC102 is a 103.5-kb plasmid initially found in P. aeruginosa clone C strains that can exist as a plasmid or integrate into the chromosome, and can excise from the chromosome at a rate of up to 10% (He et al., 2004; Klockgether et al., 2004, 2007). A recent study comparing the genomes of five sequenced P. aeruginosa strains identified 62 genomic locations where at least one strain differed from the others by at least four ORFs (Mathee et al., 2008). These loci were designated ‘regions of genomic plasticity (RGPs)’ and represent hot spots for the presence of genomic islands. Therefore, characterized genomic islands represent a small fraction of the genomic diversity present in P. aeruginosa (Wolfgang et al., 2003).

[0010] Virulence is a complex trait requiring multiple steps, including entry into the host, adherence to and spread through host tissues, subversion of host defense systems, and induction of tissue damage (Finlay & Falkow, 1997). In P. aeruginosa, distinct strains appear to use a varying combination of factors to progress through these steps, and some of these factors appear to be encoded by genomic islands (Lee et al., 2006). This may suggest that unusually virulent strains of P. aeruginosa are likely to harbor a larger number of novel and interesting genomic islands. Thus, in a previous report, the virulence of a large collection of P. aeruginosa isolates was assessed in order to identify a candidate strain for studies aimed at identifying novel genomic islands (Battle et al., 2008). For this purpose, a set of 35 previously characterized P. aeruginosa clinical isolates (designated PSE isolates), all of which were originally cultured from patients with ventilator-associated pneumonia, was used (Hauser et al., 2002). Each isolate was screened for virulence in a mouse model of acute pneumonia and a lettuce leaf model of virulence in plants (Schulert et al., 2003; Battle et al., 2008). One isolate, PSE9, was noted to be virulent in both models and was chosen for further analysis. Subtractive hybridization was used to compare the genome of PSE9 with that of the less virulent but fully sequenced strain PAO1. This yielded 35 nonredundant sequences found in PSE9 but not in PAO1. Of these, 13 sequences corresponded to previously identified P. aeruginosa genetic elements. Seven novel islands were identified, one of which was designated P. aeruginosa genomic island 5 (PAGI-5) and examined further. This 99-kb island was shown to contain regions that were associated with highly virulent P. aeruginosa strains. Mutational analysis of these regions confirmed that they contributed to the highly virulent phenotype of the source strain. In addition to PAGI-5, an additional six PSE9 islands were identified by a similar approach and were designated PAGI-6, PAGI-7, PAGI-8, PAGI-9, PAGI-10, and PAGI-11.

[0011] Targeting of highly virulent bacterial strains may be a useful strategy for identifying novel genomic islands and virulence determinants. These determinants may be useful for identifying especially virulent strains of Pseudomonas spp. and may further be useful in diagnostic and therapeutic methods.

### SUMMARY

[0012] Disclosed are Pseudomonas aeruginosa Genomic Island (PAGI) nucleic acid sequences referred to as PAGI-5, PAGI-6, PAGI-7, PAGI-8, PAGI-9, PAGI-10, and PAGI-11 and the use thereof for detecting virulent strains of Pseudomonas bacteria. In some embodiments, these nucleic acid sequences may be useful in methods for identifying strains of Pseudomonas aeruginosa that comprise these nucleic acid sequences and exhibit increased virulence in comparison to strains that do not comprise these nucleic acid sequences.

[0013] The disclosed methods may be utilized to detect a virulent strain of Pseudomonas bacteria in a sample. The methods typically include detecting, either directly or indirectly, at least a fragment of PAGI-5, PAGI-6, PAGI-7, PAGI-8, PAGI-9, PAGI-10, or PAGI-11 nucleic acid in the sample, thereby detecting the virulent strain of Pseudomonas bacteria. In some embodiments, the methods include: (a) amplifying at least a fragment of PAGI-5, PAGI-6, PAGI-7, PAGI-8, PAGI-9, PAGI-10, or PAGI-11 from the sample to obtain amplified DNA; and (b) detecting the amplified DNA, thereby detecting the virulent strain of Pseudomonas bacteria. In other embodiments, the methods include (a) isolating nucleic acid from the sample; (b) contacting the isolated nucleic with an oligonucleotide that specifically hybridizes to nucleic acid of PAGI-5, PAGI-6, PAGI-7, PAGI-S, PAGI-9, PAGI-10, or PAGI-11; and (c) detecting hybridization of the oligonucleotide to the isolated nucleic acid, thereby detecting the virulent strain of Pseudomonas bacteria. In further embodiments, the methods include (a) isolating nucleic acid from the sample; (b) detecting a nucleic acid sequence in the isolated nucleic acid which comprises at least 10, 15, 20, 25, 30, 35, 40, 45, or 50 consecutive nucleotides of PAGI-5, PAGI-6, PAGI-7, PAGI-8, PAGI-9, PAGI-10, or PAGI-11, thereby detecting the virulent strain of Pseudomonas bacteria in the sample. Optionally, the methods include or do not include detecting PAGI-1, PAGI-2, PAGI-3, or PAGI-4 nucleic acid in the sample. Optionally, the methods include or do not include detecting at least a fragment of Pseudomonas aeruginosa pathenogenicity island 1 (PAPI-1) or (PAPI-2) (i.e., at least a fragment of PAPI-1 or PAPI-2), and in particular, at least a fragment of the exoU gene.

[0014] The methods may be utilized to identify a virulent strain of Pseudomonas bacteria (i.e., Pseudomonas spp.). In particular, the methods may be utilized to identify a virulent strain of Pseudomonas aeruginosa.

[0015] The methods may be utilized to identify a virulent strain of Pseudomonas bacteria in any suitable sample. Suitable samples may include biological samples from human patients.

[0016] The methods may include detecting at least a fragment of nucleic acid of PAGI-5, PAGI-6, PAGI-7, PAGI-8, PAGI-9, PAGI-10, or PAGI-11, or combinations thereof. Detecting may include amplifying DNA of PAGI-5, PAGI-6, PAGI-7, PAGI-8, PAGI-9, PAGI-10, or PAGI-11, or combinations thereof. In some embodiments, the amplified DNA may include at least about 50, 100, 150, 200, 250, 300, 400, 500, or 1000 contiguous nucleotides of PAGI-5, PAGI-6, PAGI-7, PAGI-8, PAGI-9, PAGI-10, or PAGI-1. For example, the amplified DNA may include at least about 50, 100, 150, 200, 250, 300, 400, 500, or 1000 contiguous nucleotides of PAGI-5 within novel region I (NR-I) or novel region II (NR-II). In some embodiments, the amplified DNA includes at least a portion of an ORF present in PAGI-5, PAGI-6, PAGI-7, PAGI-8, PAGI-9, PAGI-10, or PAGI-11, or combinations thereof. For example, the amplified DNA may include at least a portion of an ORF present in PAGI-5 within novel region I (NR-I) or novel region II (NR-II). Optionally, the methods include or do not include detecting a fragment of nucleic acid of PAGI-1, PAGI-2, PAGI-3, or PAGI-4 in the sample. Optionally, the methods include or do not include detecting at least a fragment of PAPI-1 or PAPI-2, and in particular include or do not include detecting at least a fragment of the exoU gene.

[0017] The methods may include contacting nucleic that is isolated from a sample with an oligonucleotide that specifically hybridizes to nucleic acid of PAGI-5, PAGI-6, PAGI-7, PAGI-8, PAGI-9, PAGI-10, or PAGI-11, or combinations thereof. The isolated nucleic acid may include DNA, which optionally may be amplified DNA. The oligonucleotide may include a label, for example the oligonucleotide may be conjugated to a fluorophore or a radioisotope. Hybridization of the oligonucleotide to the isolated nucleic acid may include detecting a signal from the label. In some embodiments, the isolated nucleic acid may be contacted with a pair of oligonucleotides that function as primers for amplifying at least a portion of the isolated nucleic acid to obtain amplified DNA. Detecting hybridization of the oligonucleotide may include detecting the amplified DNA. Optionally, the methods include or do not include contacting the isolated nucleic acid with an oligonucleotide that specifically hybridizes to nucleic acid of PAGI-1, PAGI-2, PAGI-3, or PAGI-4. Optionally, the methods include or do not include contacting the isolated nucleic acid with an oligonucleotide that specifically hybridizes to nucleic acid of PAPI-1 or PAPI-2, and in particular the exoU gene.

[0018] The disclosed methods may utilize one or more oligonucleotides that hybridize specifically to nucleic acid of PAGI-5, PAGI-6, PAGI-7, PAGI-8, PAGI-9, PAGI-10, or PAGI-11, or combinations thereof (e.g., as probes or primers for amplification). In some embodiments, the methods utilize one or more oligonucleotides that hybridize specifically to one or more ORFs present in PAGI-5, PAGI-6, PAGI-7, PAGI-8, PAGI-9, PAGI-10, or PAGI-11. In further embodiments, the methods utilize one or more oligonucleotides that hybridize specifically to nucleic acid of PAGI-5 within novel region I (NR-I) or novel region II (NR-II). The one or more oligonucleotides may hybridize specifically to one or more ORFs present within novel region I (NR-I) or novel region II (NR-II) of PAGI-5. Optionally, the oligonucleotides hybridize or do not hybridize specifically to nucleic acid of PAGI-1, PAGI-2, PAGI-3, or PAGI-4 (e.g., within an ORF contained therein). Optionally, the oligonucleotides hybridize or do not hybridize specifically to nucleic acid of PAPI-1 or PAPI-2, and in particular the exoU gene.

[0019] The disclosed methods may include detecting a nucleotide sequence in a nucleic acid isolated from a sample (which may include DNA that optionally has been amplified). The detected nucleotide sequence may include at least 10, 15, 20, 25, 30, 35, 40, 45, or 50 consecutive nucleotides of PAGI-5, PAGI-6, PAGI-7, PAGI-8, PAGI-9, PAGI-10, or PAGI-11, or combinations thereof. Detecting the nucleotide sequence may include contacting the isolated nucleic acid with an oligonucleotide that specifically hybridizes to nucleic acid of PAGI-5, PAGI-6, PAGI-7, PAGI-8, PAGI-9, PAGI-10, or PAGI-11. Optionally, the oligonucleotide may include a label and detecting hybridization of the oligonucleotide to the isolated nucleic acid may include detecting a signal from the label. Detecting the nucleotide sequence may include amplifying at least a portion of the isolated nucleic acid that includes the nucleotide sequence. In some embodiments, the detected nucleotide sequence may be present within novel region I (NR-I) or novel region II (NR-II) of PAGI-5. The detected nucleotide sequence may be present within an ORF (e.g., an ORF of PAGI-5, PAGI-6, PAGI-7, PAGI-8, PAGI-9, PAGI-10, or PAGI-11). Optionally, the detected nucleotide sequence includes or does not include 10, 15, 20, 25, 30, 35, 40, 45, or 50 consecutive nucleotides of PAGI-I, PAGI-2, PAGI-3, or PAGI-4. Optionally, the detected nucleotide sequence includes or does not include 10, 15, 20, 25, 30, 35, 40, 45, or 50 consecutive nucleotides of PAPI-1 or PAPI-2, and in particular the exoU gene.

[0020] The methods may include indirectly detecting at least a fragment of PAGI-5, PAGI-6, PAGI-7, PAGI-8, PAGI-9, PAGI-10, or PAGI-11 nucleic acid in the sample. For example, the methods may include detecting expression of at least a fragment of PAGI-5, PAGI-6, PAGI-7, PAGI-8, PAGI-9, PAGI-10, or PAGI-11 nucleic acid in the sample.

[0021] In some embodiments, the methods include: (a) reacting a sample with an antibody that binds specifically to a polypeptide encoded by an ORF present in PAGI-5, PAGI-6, PAGI-7, PAGI-8, PAGI-9, PAGI-10, or PAGI-11; and (b) detecting binding of the antibody to the polypeptide, thereby detecting the virulent strain of Pseudomonas bacteria in the sample. The antibody may include a label and detecting binding of the antibody to the polypeptide may include detecting a signal from the label. In some embodiments, the detected polypeptide may be encoded by an ORF present in PAGI-5 within novel region I (NR-I) or novel region II (NR-II). Optionally, the methods further may include or may not include reacting the sample with an antibody that binds specifically to a polypeptide encoded by an ORF present in PAGI-1, PAGI-2, PAGI-3, or PAGI-4. Optionally, the methods further may include or may not include reacting the sample with an antibody that binds specifically to a polypeptide encoded by an ORF present in PAPI-1 or PAPI-2, in particular the polypeptide encoded by the exoU gene.

[0022] Also disclosed are kits for performing the aforementioned methods. In some embodiments, the kits include one or more oligonucleotides for detecting or amplifying a nucleic acid sequence of PAGI-5, PAGI-6, PAGI-7, PAGI-8, PAGI-9, PAGI-10, or PAGI-11. The kits may include one or more oligonucleotides for detecting or amplifying a nucleic acid sequence of novel region I (NR-I) or novel region II (NR-II) of PAGI-5. The kits may include an antibody that binds specifically to a polypeptide encoded by an ORF present in PAGI-5, PAGI-6, PAGI-7, PAGI-8, PAGI-9, PAGI-10, or PAGI-11. In some embodiments, the kits include an antibody that binds specifically to a polypeptide encoded by an ORF present in PAGI-5 within novel region I (NR-I) or novel region II (NR-II).

### BRIEF DESCRIPTION OF THE DRAWINGS

[0023] FIG. 1. Virulence of P. aeruginosa isolates in a mouse model of acute pneumonia and distribution of PAGI-5 regions among these isolates. (A) Mice were infected with a range of bacterial inocula and monitored over the subsequent 7 days to calculate LD₅₀s. The y axis is inverted so that the results for more virulent isolates are indicated by taller bars. The gray bars indicate ExoU-secreting isolates, the diagonally striped bars indicate ExoS-secreting isolates, and the open bars indicate nonsecreting isolates. “Other” refers to isolate PSE7, which had a functional type III secretion system but did not secrete any effector proteins. (These results were previously published by Schulert et al. (2003) and are reproduced here in adapted form.) (B) Presence of PAGI-5 conserved and novel sequences in the panel of P. aeruginosa clinical isolates. The regions of PAGI-5 are indicated on the left, and a plus sign indicates the presence of the sequence.

[0024] FIG. 2. Virulence of P. aeruginosa isolates in a lettuce leaf model of infection. (A) Lettuce leaf infected with positive control strain PA14, clinical isolate PSE9, and reference strain PAO1. (B) Area of soft rot caused by each P. aeruginosa isolate normalized to the area of soft rot caused by PA14. The data are the means±standard errors of the means for three inoculation sites on a single leaf. For an explanation of the type III secretion profiles see the legend to FIG. 1.

[0025] FIG. 3. Flow chart showing the results of analysis of 75 PSE9 subtractive hybridization products. After removal of false positives, redundant clones, and sequences from previously characterized genomic islands, 22 distinct sequences remained. These sequences were used to screen a PSE9 genomic library.

[0026] FIG. 4. Map of PAGI-5. Arrows represent ORFs and are oriented in the direction of transcription. Gray arrows represent ORFs with similarity to PAPI-1 sequences, and open arrows represent ORFs that lack PAPI-1 similarity. Black arrows represent PAO1 ORFs that flank PAGI-5. Diagonal stripes indicate ORFs that are predicted to encode proteins with sequences that do not suggest a function, and speckled arrows indicate ORFs expected to play a role in DNA mobility. tRNA attL and attR sites are indicated by vertical arrows. G+C contents are indicated above the ORFs and were calculated using a sliding 100-bp window. PAGI-5 ORFs are designated “5PGX,” where “X” is the sequential number of the ORF within the genomic island.

[0027] FIG. 5. Alignment of PAGI-5, PAPI-1, and ExoU island A. Dark bands and ORFs represent conserved nucleotide sequences, whereas open ORFs indicate unrelated sequences. The double lines beneath PAGI-5 indicate the sequences that were amplified by PCR to detect the presence of the corresponding conserved and novel regions of PAGI-5 in the panel of 35 P. aeruginosa clinical isolates.

[0028] FIG. 6. Survival of PSE9, PSE9ΔNR-I, PSE9ΔNR-II, and PAO1 in a mouse model of acute pneumonia. The symbols indicate the percentage of animals surviving in each experimental group over time. Each group contained 14 to 35 mice pooled from at least two separate experiments. An asterisk indicates that values are significantly different (P=0.0036, log rank test).

[0029] FIG. 7. Results of competition assays using mixtures of PSE9 and PAO1, PSE9ΔNR-I, or PSE9ΔNR-II at 22 h post-infection for the lungs and spleen. Data from eight or nine mice from two experiments were pooled. Each symbol indicates the CI for the tissue sample from one mouse, and the bars indicate medians. CIs for parental strain PSE9 in competition with either PSE9ΔNR-I, PSE9ΔNR-II, or PAO1 were compared to CIs for parental strain PSE9 in competition with PSE9 tagged with a gentamicin resistance cassette to determine whether differences were significant. Statistical significance was determined using a two-tailed unpaired Student's I test (*, p≦0.05; **, P≦0.005).

[0030] FIG. 8. Strategy for identifying fosmid clones containing subtractive hybridization sequences. A three-tiered PCR-based screening process was used whereby pools of 96 fosmid clones were first screened for sequences found by subtractive hybridization. In the second screen, 12 pools of eight fosmid clones each were screened from each 96-well plate identified in the first screen. Finally, each individual clone from the pools identified in the second screen was itself screened for the presence of subtractive hybridization sequences.

[0031] FIG. 9. The PAGI-6 genomic island and map of PAGI-6. Arrows represent ORFs and are oriented in the direction of transcription. Arrows with gray backgrounds represent ORFs with similarity to φCTX sequences, and arrows with white backgrounds represent ORFs that lack φCTX similarity. Black arrows represent PAO1 ORFs that flank PAGI-6. ORFs without similarity to characterized ORFs are indicated with diagonal stripes, and ORFs expected to play a role in DNA mobility are speckled. tRNA attL and attR sites are represented by vertical arrows. The G+C content is shown above the ORFs, calculated from a sliding 100 bp window. PAGI-6 ORFs are referred to as ‘6PG#’, where ‘#’ is the sequential number of the ORF within the genomic island.

[0032] FIG. 10. PAGI-6 alignment with the φCTX genome. Dark bands and ORFs represent conserved nucleotide sequences, whereas light gray and white ORFs indicate unrelated sequences. att sites are represented by vertical arrows, and cos sites by circles.

[0033] FIG. 11. Map of PAGI-7. Arrows represent ORFs and are oriented in the direction of transcription. Arrows with white backgrounds represent PAGI-7 ORFs, and black arrows represent PAO1 ORFs that flank PAGI-7. ORFs without similarity to characterized ORFs are indicated by diagonal stripes, and ORFs expected to play a role in DNA mobility are speckled. The locations of inverted repeat sequences are indicated. The G+C content is shown above the ORFs, calculated from a sliding 100 bp window. PAGI-7 ORFs are referred to as ‘7PG#’, where ‘#’ is the sequential number of the ORF within the genomic island.

[0034] FIG. 12. Map of PAGI-8. Arrows represent ORFs and are oriented in the direction of transcription. Arrows with white backgrounds represent PAGI-8 ORFs, and black arrows represent PAO1 ORFs that flank PAGI-8. ORFs without similarity to characterized ORFs are indicated by diagonal stripes, and ORFs expected to play a role in DNA mobility are speckled. tRNA attL and attR sites are represented by vertical arrows. The G+C content is shown above the ORFs, calculated from a sliding 100 bp window. PAGI-8 ORFs are referred to as ‘8PG#’, where ‘#’ is the sequential number of the ORF within the genomic island.

[0035] FIG. 13. Maps of (a) PAGI-9, (b) PAGI-10, and (c) PAGI-11. Arrows with white backgrounds represent genomic island ORFs, and black arrows represent flanking PAO1 ORFs. The underlying gray bars indicate the extent of the PAO1 conserved sequence. Cross-hatching represents conserved PA14 sequence. The predicted locations of the Rhs element core extensions are indicated. The G+C content is shown above the ORFs, calculated from a sliding 100 bp window.

[0036] FIG. 14. Location of PSE9 genomic islands within the P. aeruginosa chromosome. The circular chromosome represents that of PAO1, which is 6,264,403 bp (Stover, et al., 2000). The actual chromosome of PSE9 has not been sequenced and may differ in size and include rearrangements relative to that of PAO1. The O-antigen cluster, the pilA gene, and PAGI-5, which were also identified by the subtractive hybridization approach, are described elsewhere (Battle, et al., 2008) but included here for completeness.

### DETAILED DESCRIPTION

[0037] The disclosed subject matter may be further described utilizing terms as defined below.

[0038] Unless otherwise specified or indicated by context, the terms “a”, “an”, and “the” mean “one or more.”

[0039] As used herein, “about”, “approximately,” “substantially,” and “significantly” will be understood by persons of ordinary skill in the art and will vary to some extent on the context in which they are used. If there are uses of the term which are not clear to persons of ordinary skill in the art given the context in which it is used, “about” and “approximately” will mean plus or minus ≦10% of the particular term and “substantially” and “significantly” will mean plus or minus >10% of the particular term.

[0040] As used herein, the terms “include” and “including” have the same meaning as the terms “comprise” and “comprising.”

[0041] The terms “patient” and “subject” may be used interchangeably herein. A patient may be a human patient. A patient may refer to a human patient having or at risk for acquiring an infection with Pseudomonas spp. (e.g., Pseudomonas aeruginosa). A “patient in need thereof” may include a patient having an infection with Pseudomonas spp. (e.g., Pseudomonas aeruginosa) or at risk for developing infection with Pseudomonas spp. (e.g., Pseudomonas aeruginosa).

[0042] The term “sample” is to be interpreted broadly to include patient samples and environmental samples. The term “patient sample” is meant to include biological samples such as tissues and bodily fluids. “Bodily fluids” may include, but are not limited to, blood, serum, plasma, saliva, cerebral spinal fluid, pleural fluid, tears, lactal duct fluid, lymph, sputum, and semen. Environmental samples may include, but are not limited to, surface swabs and water samples.

[0043] The term “nucleic acid” or “nucleic acid sequence” refers to an oligonucleotide, nucleotide or polynucleotide, which may include a full-length polynucleotide or a fragment or portion thereof. Nucleic acid may be single or double stranded, and represent the sense or antisense strand with respect to an encoded polypeptide. A nucleic acid may include DNA or RNA, and may be of natural or synthetic origin. For example, a nucleic acid may include mRNA or cDNA. Nucleic acid may include nucleic acid that has been reverse-transcribed and/or amplified (e.g., using polymerase chain reaction). A “fragment” of DNA typically comprises at least about 10, 15, 20, 25, 30, 35, 40, 45, or 50 nucleotides, and preferably at least about 50, 100, 150, 200, 250, 300, 400, 500, or 1000 nucleotides (which may be contiguous nucleotides relative to a reference sequence such as PAGI-5, PAGI-6, PAGI-7, PAGI-8, PAGI-9, PAGI-10, or PAGI-11, as further described herein, such as any of SEQ ID NOs:1-7.) The term “at least a fragment of” contemplates a full-length polynucleotide.

[0044] The term “source of nucleic acid” refers to any sample which contains nucleic acids (RNA or DNA). Particularly preferred sources of target nucleic acids are biological samples including, but not limited to blood, plasma, serum, saliva, cerebral spinal fluid, pleural fluid, milk, lymph, sputum and semen.

[0045] A “gene” refers to a DNA sequence that comprises control and coding sequences necessary for the production of an RNA, which may have a non-coding function (e.g., a ribosomal or transfer RNA) or which may include a polypeptide or a polypeptide precursor. As used herein the term “codon” refers to a sequence of three adjacent nucleotides (either RNA or DNA) constituting the genetic code that determines the insertion of a specific amino acid in a polypeptide chain during protein synthesis or the signal to stop protein synthesis. The term “codon” is also used to refer to the corresponding (and complementary) sequences of three nucleotides in the messenger RNA into which the original DNA is transcribed. An “open reading frame” or “ORF” refers to a consecutive series of codons that encodes a polypeptide. A gene for a polypeptide includes an ORF.

[0046] The term “oligonculeotide” is understood to be a molecule that has a sequence of bases on a backbone comprised mainly of identical monomer units at defined intervals. The bases are arranged on the backbone in such a way that they can enter into a bond with a nucleic acid having a sequence of bases that are complementary to the bases of the oligonucleotide. The most common oligonucleotides have a backbone of sugar phosphate units. A distinction may be made between oligodeoxyribonucleotides that do not have a hydroxyl group at the 2′ position and oligoribonucleotides that have a hydroxyl group in this position. Oligonucleotides of the method which function as primers or probes are generally at least about 8, 10, 12, or 14 nucleotide long and more preferably about 15 to 25 nucleotides long, although shorter or longer oligonucleotides may be used in the method. The exact size will depend on many factors, which in turn depend on the ultimate function or use of the oligonucleotide. The oligonucleotide may be generated in any manner, including chemical synthesis, DNA replication, reverse transcription, PCR, or a combination thereof. The oligonucleotide may be modified. For example, the oligonucleotide may be labeled with an agent that produces a detectable signal (e.g., a fluorophore or a radioisotope).

[0047] Oligonucleotides used as primers or probes for specifically amplifying (e.g., amplifying a particular target nucleic acid sequence) or specifically detecting (e.g., detecting a particular target nucleic acid sequence) generally are capable of specifically hybridizing to the target nucleic acid. An oligonucleotide (e.g., a probe or a primer) that is specific for a target nucleic acid will “hybridize” to the target nucleic acid under suitable conditions. As used herein, “hybridization” or “hybridizing” refers to the process by which an oligonucleotide single strand anneals with a complementary strand through base pairing under defined hybridization conditions.

[0048] As contemplated herein, an oligonucleotide that specifically hybridizes to PAGI-5, PAGI-6, PAGI-7, PAGI-8, PAGI-9, PAGI-10, or PAGI-10, may comprise a nucleic acid sequence (e.g., at least about 10, 15, 20, 25, 30, 35, 40, 45, or 50 nucleotides) that is the reverse complement of the corresponding sequence in PAGI-5, PAGI-6, PAGI-7, PAGI-8, PAGI-9, PAGI-10, or PAGI-11 to which the oligonucleotide specifically hybridizes. However, as contemplated herein, an oligonucleotide that specifically hybridizes to PAGI-5, PAGI-6, PAGI-7, PAGI-8, PAGI-9, PAGI-10, or PAGI-11 need not comprise the exact reverse complement of the corresponding sequence in PAGI-5, PAGI-6, PAGI-7, PAGI-8, PAGI-9, PAGI-10, or PAGI-11 to which the oligonucleotide specifically hybridizes. “Specific hybridization” is an indication that two nucleic acid sequences share a high degree of complementarity. Specific hybridization complexes form under permissive annealing conditions and remain hybridized after any subsequent washing steps. Permissive conditions for annealing of nucleic acid sequences are routinely determinable by one of ordinary skill in the art and may occur, for example, at 65° C. in the presence of about 6×SSC. Stringency of hybridization may be expressed, in part, with reference to the temperature under which the wash steps are carried out. Such temperatures are typically selected to be about 5° C. to about 20° C. lower than the thermal melting point (Tm) for the specific sequence at a defined ionic strength and pH. The Tm is the temperature (under defined ionic strength and pH) at which 50% of the target sequence hybridizes to a perfectly matched probe. Equations for calculating Tm and conditions for nucleic acid hybridization are known in the art.

[0049] “Primer” refers to an oligonucleotide that is capable of acting as a point of initiation of synthesis when placed under conditions in which primer extension is initiated (e.g., primer extension associated with an application such as PCR). An oligonucleotide “primer” may occur naturally, as in a purified restriction digest or may be produced synthetically. Primers contemplated herein may include, but are not limited to, oligonucleotides that comprise the nucleocleotide sequence of any of SEQ ID NOs:204-265.

[0050] A “probe” refers to an oligonucleotide that interacts with a target nucleic acid via hybridization. A probe may be fully complementary to a target nucleic acid sequence or partially complementary. The level of complementarity will depend on many factors based, in general, on the function of the probe. A probe or probes can be used, for example to detect the presence or absence of a mutation in a nucleic acid sequence by virtue of the sequence characteristics of the target. Probes can be labeled or unlabeled, or modified in any of a number of ways well known in the art. A probe may specifically hybridize to a target nucleic acid.

[0051] A “target nucleic acid” refers to a nucleic acid molecule containing a sequence that has at least partial complementarity with a probe oligonucleotide and/or a primer oligonucleotide. A primer or probe may specifically hybridize to a target nucleic acid. Target nucleic acid may refer to nucleic acid of PAGI-5, PAGI-6, PAGI-7, PAGI-8, PAGI-9, PAGI-10, PAGI-11, or combinations thereof (i.e., SEQ ID NOs:1-7, respectively).

[0052] The term “amplification” or “amplifying” refers to the production of additional copies of a nucleic acid sequence. Amplification is generally carried out using polymerase chain reaction (PCR) technologies known in the art. The term “amplification reaction system” refers to any in vitro means for multiplying the copies of a target sequence of nucleic acid. The term “amplification reaction mixture” refers to an aqueous solution comprising the various reagents used to amplify a target nucleic acid. These may include enzymes (e.g., a thermostable polymerase), aqueous buffers, salts, amplification primers, target nucleic acid, and nucleoside triphosphates, and optionally at least one labeled probe and/or optionally at least one agent for determining the melting temperature of an amplified target nucleic acid (e.g., a fluorescent intercalating agent that exhibits a change in fluorescence in the presence of double-stranded nucleic acid).

[0053] As used herein the term “sequencing” as in determining the sequence of a polynucleotide refers to methods that determine the base identity at multiple base positions or determine the base identity at a single position. “Detecting nucleic acid” as contemplated herein, may include “sequencing nucleic acid.”

[0054] The term “polypeptide” refers to a polymer of amino acids and fragments or portions thereof. A polypeptide may include amino acids of natural or synthetic origin. A “fragment” of a polypeptide, which alternatively may be called a peptide fragment, typically comprises at least about 10, 15, 20, 25, 30, 35, 40, 45, or 50 amino acids, and preferably at least about 50, 100, 150, 200, 250, 300, 400, 500, or 1000 amino acids (which may be contiguous amino acids relative to a reference amino acid sequence encoded by an ORF present in any of PAGI-5, PAGI-6, PAGI-7, PAGI-8, PAGI-9, PAGI-10, or PAGI-11, as further described herein, such as any of SEQ ID NOs:8-203 or the ORFs disclosed in Tables 2 and 6-9.) The term “at least a fragment of” contemplates a full-length polypeptide.

[0055] The term “Pseudomonas” or “Pseudomonas spp.” as used herein refers to any type of Pseudomonas bacteria, including but not limited to Pseudomonas aeruginosa, Pseudomonas putida, Pseudomonas fluorescens, and Pseudomonas multivorans. Particularly preferred for carrying out the present invention is Pseudomonas aeruginosa.

[0056] The terms “virulence” and “virulent” as used herein refers to the degree of pathogenicity of a microorganism, as indicated by fatality rate of infected hosts infected with that microorganism and/or the ability of that microorganism to invade the tissues of an infected host. For example, virulence may be assessed by determining the amount of bacteria which results in a 50% fatality rate in a given population of hosts (e.g., the LD50 in a population of mice). Relative virulence may refer to the virulence of a strain of Pseudomonas bacteria that comprises PAGI-5, PAGI-6, PAGI-7, PAGI-8, PAGI-9, PAGI-10, PAGI-11, or combinations thereof, in comparison to a strain of Pseudomonas bacteria that does not comprise Pseudomonas bacteria PAGI-5, PAGI-6, PAGI-7, PAGI-8, PAGI-9, PAGI-10, or PAGI-11. In some embodiments, a virulent strain of Pseudomonas bacteria may have an LD50 (e.g., in mice) that is no more than 1×10⁸ CFU, preferably no more than 1×10⁷ CFU, more preferably no more than 1×10⁶ CFU, even more preferably no more than 1×10⁵ CFU. For example, a highly virulent strain of Pseudomonas bacteria may have an LD50 in mice that is no more than about 1.3×10⁶ CFU as discussed below.

[0057] The term PAGI refers to “Pseudomonas aeruginosa Genomic Island.” As used herein, a “genomic island” refers to any chromosomal continuous fragment of DNA, regardless of size, that is found in some Pseudomonas aeruginosa strains but not others. The nucleic acid sequences for PAGI-5 (SEQ ID NO:1), PAGI-6 (SEQ ID NO:2), PAGI-7 (SEQ ID NO:3), PAGI-8 (SEQ ID NO:4), PAGI-9 (SEQ ID NO:5), PAGI-10 (SEQ ID NO:6), and PAGI-11 (SEQ ID NO:7) have been deposited at GenBank under accession nos. EF611301, EF611302, EF611303, EF6.1.1304, EF611305, EF611306, and EF611307, respectively, which GenBank entries are incorporated herein by reference in their entireties. The nucleic acid sequences for PAGI-1, PAGI-2, PAGI-3, and PAGI-4 have been deposited at GenBank under accession nos. AF241171, AF440523, AF440524, and AY258138, respectively, which GenBank entries are incorporated herein by reference in their entireties.

[0058] The methods contemplated herein may include detecting nucleic acid of an open reading frame (ORF) present within PAGI-5, PAGI-6, PAGI-7, PAGI-8, PAGI-9, PAGI-10, or PAGI-11. The methods contemplated herein also may include detecting a polypeptide encoded by an open reading frame present within PAGI-5, PAGI-6, PAGI-7, PAGI-8, PAGI-9, PAGI-10, or PAGI-11, which may include but are not limited to polypeptides comprising an amino acid sequence of any of SEQ ID NOs:8-203 or the ORFs disclosed in Tables 2 and 6-9. The methods may include detecting at least a fragment of a polypeptide encoded by an open reading frame present within PAGI-5, PAGI-6, PAGI-7, PAGI-8, PAGI-9, PAGI-10, or PAGI-11 (e.g., where the fragment comprises at least about a 10, 15, 20, 25, 30, 35, 40, 45, or 50 consecutive amino acid sequence of any of SEQ ID NOs:8-203 or the ORFs disclosed in Tables 2 and 6-9).

[0059] The methods contemplated herein may include detecting a polypeptide encoded by an open reading frame present within PAGI-5, PAGI-6, PAGI-7, PAGI-8, PAGI-9, PAGI-10, or PAGI-11, (e.g., a full-length polypeptide or a fragment thereof), by reacting the polypeptide or the fragment thereof with an antibody that specifically binds to the polypeptide or the fragment thereof. The term “antibody” is used in the broadest sense and specifically covers, for example, polyclonal antibodies, monoclonal antibodies, single chain antibodies, and antibody fragments. “Antibody fragments” comprise a portion of an intact antibody, preferably the antigen binding or variable region of the intact antibody. Examples of antibody fragments include Fab, Fab′, F(ab′)₂, and Fv fragments; diabodies; linear antibodies (Zapata et al., Protein Eng. 8(10): 1057-1062 [1995]); single-chain antibody molecules (i.e., scFv); and multispecific antibodies formed from antibody fragments. An antibody that “specifically binds to” or is “specific for” a particular polypeptide or an epitope on a particular polypeptide is one that binds to that particular polypeptide or epitope on a particular polypeptide without substantially binding to any other polypeptide or polypeptide epitope.

[0060] As used herein, a “label” refers to a detectable compound or composition which is conjugated directly or indirectly to an oligonucleotide or antibody so as to generate a “labeled” oligonucleotide or antibody. The label may be detectable by itself (e.g., radioisotope labels or fluorescent labels) or, in the case of an enzymatic label, may catalyze chemical alteration of a substrate compound or composition which then is detectable.

### ILLUSTRATIVE EMBODIMENTS

[0061] The following list of Embodiments is illustrative and is not intended to limit the scope of the claimed subject matter.

### Embodiment 1

[0062] A method for detecting a virulent strain of Pseudomonas bacteria in a sample, the method comprising detecting at least a fragment of PAGI-5, PAGI-6, PAGI-7, PAGI-8, PAGI-9, PAGI-10, or PAGI-11 nucleic acid in the sample, thereby detecting the virulent strain of Pseudomonas bacteria.

### Embodiment 2

[0063] The method of embodiment 1, comprising: (a) amplifying at least a fragment of PAGI-5, PAGI-6, PAGI-7, PAGI-8, PAGI-9, PAGI-10, or PAGI-11 from the sample to obtain amplified DNA; and (b) detecting the amplified DNA, thereby detecting the virulent strain of Pseudomonas bacteria.

### Embodiment 3

[0064] The method of embodiment 2, wherein the virulent strain of Pseudomonas bacteria is a virulent strain of Pseudomonas aeruginosa.

### Embodiment 4

[0065] The method of embodiment 2 or 3, wherein the sample is a biological sample from a patient.

### Embodiment 5

[0066] The method of any of embodiments 2-4, wherein the amplified DNA comprises at least about 100, 150, 200, 250, 300, 400, 500, or 1000 contiguous nucleotides of PAGI-5, PAGI-6, PAGI-7, PAGI-8, PAGI-9, PAGI-10, or PAGI-11.

### Embodiment 6

[0067] The method of any of embodiments 2-5, wherein the amplified DNA comprises at least about 100, 150, 200, 250, 300, 400, 500, or 1000 contiguous nucleotides of PAGI-5 within novel region I (NR-I) or novel region II (NR-II).

### Embodiment 7

[0068] The method of any of embodiments 2-5, wherein the amplified DNA comprises at least a portion of an ORF present in PAGI-5, PAGI-6, PAGI-7, PAGI-8, PAGI-9, PAGI-10, or PAGI-11.

### Embodiment 8

[0069] The method of embodiment 1, comprising: (a) isolating nucleic acid from the sample; (b) contacting the isolated nucleic with an oligonucleotide that specifically hybridizes to nucleic acid of PAGI-5, PAGI-6, PAGI-7, PAGI-8, PAGI-9, PAGI-10, or PAGI-11; and (c) detecting hybridization of the oligonucleotide to the isolated nucleic acid, thereby detecting the virulent strain of Pseudomonas bacteria.

### Embodiment 9

[0070] The method of embodiment 8, wherein the virulent strain of Pseudomonas bacteria is a virulent strain of Pseudomonas aeruginosa.

### Embodiment 10

[0071] The method of embodiment 8 or 9, wherein the sample is a biological sample from a patient.

### Embodiment 11

[0072] The method of any of embodiments 8-10, wherein the isolated nucleic acid comprises DNA.

### Embodiment 12

[0073] The method of any of embodiments 8-11, wherein the isolated nucleic acid comprises amplified DNA.

### Embodiment 13

[0074] The method of any of embodiments 8-12, wherein the oligonucleotide comprises a label and detecting hybridization of the oligonucleotide to the isolated nucleic acid comprises detecting a signal from the label.

### Embodiment 14

[0075] The method of any of embodiments 8-13, comprising contacting the isolated nucleic with a pair of oligonucleotides that function as primers and wherein detecting hybridization of the oligonucleotide to the isolated nucleic acid comprises amplifying at least a portion of the isolated nucleic acid.

### Embodiment 15

[0076] The method of any of embodiments 8-14, wherein the oligonucleotide hybridizes specifically to one or more ORFs present in PAGI-5, PAGI-6, PAGI-7, PAGI-8, PAGI-9, PAGI-10, or PAGI-11.

### Embodiment 16

[0077] The method of any of embodiments 8-15, wherein the oligonucleotide hybridizes specifically to nucleic acid of PAGI-5 within novel region I (NR-I) or novel region II (NR-II).

### Embodiment 17

[0078] The method of any of embodiments 8-16, wherein the oligonucleotide hybridizes specifically to one or more ORFs present within novel region I (NR-I) or novel region II (NR-II) of PAGI-5.

### Embodiment 18

[0079] The method of embodiment 1, comprising: (a) isolating nucleic acid from the sample; (b) detecting a nucleic acid sequence in the isolated nucleic acid which comprises at least 10, 15, 20, 25, 20, 35, 40, 45, or 50 consecutive nucleotides of PAGI-5, PAGI-6, PAGI-7, PAGI-8, PAGI-9, PAGI-10, or PAGI-11, thereby detecting the virulent strain of Pseudomonas bacteria in the sample.

### Embodiment 19

[0080] The method of embodiment 18, wherein the virulent strain of Pseudomonas bacteria is a virulent strain of Pseudomonas aeruginosa.

### Embodiment 20

[0081] The method of embodiment 18 or 19, wherein the sample is a biological sample from a patient.

### Embodiment 21

[0082] The method of any of embodiments 18-20, wherein the isolated nucleic acid comprises DNA.

### Embodiment 22

[0083] The method of any of embodiments 18-21, wherein the isolated nucleic acid comprises amplified DNA.

### Embodiment 23

[0084] The method of any of embodiments 18-22, wherein detecting comprises contacting the isolated nucleic acid with an oligonucleotide that specifically hybridizes to nucleic acid of PAGI-5, PAGI-6, PAGI-7, PAGI-8, PAGI-9, PAGI-10, or PAGI-11 and detecting hybridization of the oligonucleotide to the isolated nucleic acid.

### Embodiment 24

[0085] The method of embodiment 23, wherein the oligonucleotide comprises a label and detecting hybridization of the oligonucleotide to the isolated nucleic acid comprises detecting a signal from the label.

### Embodiment 25

[0086] The method of any of embodiments 18-24, wherein detecting comprises amplifying at least a portion of the isolated nucleic acid.

### Embodiment 26

[0087] The method of any of embodiments 18-25, wherein the detected nucleic acid sequence comprises at least 20 consecutive nucleotides of PAGI-5, PAGI-6, PAGI-7, PAGI-8, PAGI-9, PAGI-10, or PAGI-11.

### Embodiment 27

[0088] The method of any of embodiments 18-25, wherein the detected nucleic acid sequence comprises at least 30 consecutive nucleotides of PAGI-5, PAGI-6, PAGI-7, PAGI-8, PAGI-9, PAGI-10, or PAGI-11.

### Embodiment 28

[0089] The method of any of embodiments 18-25, wherein the detected nucleic acid sequence comprises at least 40 consecutive nucleotides of PAGI-5, PAGI-6, PAGI-7, PAGI-8, PAGI-9, PAGI-10, or PAGI-11.

### Embodiment 29

[0090] The method of any of embodiments 18-25, wherein the detected nucleic acid sequence comprises at least 50 consecutive nucleotides of PAGI-5, PAGI-6, PAGI-7, PAGI-8, PAGI-9, PAGI-10, or PAGI-11.

### Embodiment 30

[0091] The method of any of embodiments 18-25, wherein the detected nucleic acid sequence comprises at least 10 consecutive nucleotides of PAGI-5 within novel region I (NR-I) or novel region II (NR-II).

### Embodiment 31

[0092] The method of any of embodiments 18-25, wherein the detected nucleic acid sequence comprises at least 20 consecutive nucleotides of PAGI-5 within novel region I (NR-I) or novel region II (NR-II).

### Embodiment 32

[0093] The method of any of embodiments 18-25, wherein the detected nucleic acid sequence comprises at least 30 consecutive nucleotides of PAGI-5 within novel region I (NR-I) or novel region II (NR-II).

### Embodiment 33

[0094] The method of any of embodiments 18-25, wherein the detected nucleic acid sequence comprises at least 40 consecutive nucleotides of PAGI-5 within novel region I (NR-I) or novel region II (NR-II).

### Embodiment 34

[0095] The method of any of embodiments 18-25, wherein the detected nucleic acid sequence comprises at least 50 consecutive nucleotides of PAGI-5 within novel region I (NR-I) or novel region II (NR-II).

### Embodiment 35

[0096] The method of any of embodiments 18-25, wherein the detected nucleic acid sequence is present within an ORF of PAGI-5, PAGI-6, PAGI-7, PAGI-8, PAGI-9, PAGI-10, or PAGI-11.

### Embodiment 36

[0097] The method of any of embodiments 18-25, wherein the detected nucleic acid sequence is present within an ORF of PAGI-5 within novel region I (NR-I) or novel region II (NR-II).

### Embodiment 37

[0098] The method of any of embodiments 1-36, further comprising detecting, either directly or indirectly, at least a 10 nucleotide fragment of PAPI-1 or PAPI-2, and in particular at least a 10 nucleotide fragment of the exoU gene.

### Embodiment 38

[0099] A method for detecting a virulent strain of Pseudomonas bacteria in a sample, the method comprising: (a) reacting the sample with an antibody that binds specifically to a polypeptide encoded by an ORF present in PAGI-5, PAGI-6, PAGI-7, PAGI-8, PAGI-9, PAGI-10, or PAGI-11; and (b) detecting binding of the antibody to the polypeptide, thereby detecting the virulent strain of Pseudomonas bacteria in the sample.

### Embodiment 39

[0100] The method of embodiment 38, wherein the virulent strain of Pseudomonas bacteria is a virulent strain of Pseudomonas aeruginosa.

### Embodiment 40

[0101] The method of embodiment 38 or 39, wherein the sample is a biological sample from a patient.

### Embodiment 41

[0102] The method of any of embodiments 38-40, wherein the antibody comprises a label and detecting binding of the antibody to the polypeptide comprises detecting a signal from the label.

### Embodiment 42

[0103] The method of any of embodiments 38-42, wherein the detected polypeptide is encoded by an ORF present in PAGI-5 within novel region I (NR-I) or novel region II (NR-II).

### Embodiment 43

[0104] The method of any of embodiments 38-42, further comprising reacting the sample with an antibody that binds specifically to a polypeptide encoded by an ORF present in PAPI-1 or PAPI-2, in particular the polypeptide encoded by the exoU gene.

### Embodiment 44

[0105] The method of any of embodiments 1-43, wherein the virulent strain of Pseudomonas bacteria has an LD50 in mice that is no more than 1×10⁵ CFU, 1×10⁶ CFU, 1×10⁷ CFU, or 1×10⁸ CFU.

### Embodiment 45

[0106] A kit for performing any of the methods of embodiments 1-44, comprising an oligonucleotide for detecting a nucleic acid sequence of PAGI-5, PAGI-6, PAGI-7, PAGI-8, PAGI-9, PAGI-10, or PAGI-11.

### Embodiment 46

[0107] The kit of embodiment 45, comprising an oligonucleotide for detecting a nucleic acid sequence of novel region I (NR-I) or novel region II (NR-II) of PAGI-5.

### Embodiment 47

[0108] A kit for performing any of the methods of embodiments 38-44, comprising an antibody that binds specifically to a polypeptide encoded by an ORF present in PAGI-5, PAGI-6, PAGI-7, PAGI-8, PAGI-9, PAGI-10, or PAGI-11 .

### Embodiment 48

[0109] A kit of embodiment 47, comprising an antibody that binds specifically to a polypeptide encoded by an ORF present in PAGI-5 within novel region I (NR-I) or novel region II (NR-II).

### EXAMPLES

[0110] The following Examples are illustrative and are not intended to limit the scope of the claimed subject matter.

### Example 1

[0111] Reference is made to the scientific article Battle et al., “Hybrid Pathogenicity Island PAGI-5 Contributes to the Highly Virulent Phenotype of a Pseudomonas aeruginosa Isolate in Mammals,” J. Bacteriol. 2008 November; 190(21):7130-40. Epub 2008 Aug. 29, the content of which is incorporated herein by reference in its entirety.

### SUMMARY

[0112] Most known virulence determinants of Pseudomonas aeruginosa are remarkably conserved in this bacterium's core genome, yet individual strains differ significantly in virulence. One explanation for this discrepancy is that pathogenicity islands, regions of DNA found in some strains but not in others, contribute to the overall virulence of P. aeruginosa. Here, the virulence of a panel of P. aeruginosa isolates was tested in mouse and plant models of disease, and a highly virulent isolate, PSE9, was chosen for comparison by subtractive hybridization to a less virulent strain, PAO1. The resulting subtractive hybridization sequences were used as tags to identify genomic islands found in PSE9 but absent in PAO1. One 99-kb island, designated P. aeruginosa genomic island 5 (PAGI-5), was a hybrid of the known P. aeruginosa island PAPI-1 and novel sequences. Whereas the PAPI-1-like sequences were found in most tested isolates, the novel sequences were found only in the most virulent isolates. Deletional analysis confirmed that some of these novel sequences contributed to the highly virulent phenotype of PSE9. These results indicate that targeting highly virulent strains of P. aeruginosa may be a useful strategy for identifying pathogenicity islands and novel virulence determinants.

[0113] Materials and Methods

[0114] Bacterial strains and growth conditions. P. aeruginosa PSE strains PSE1 to PSE35 were previously obtained by culture of bronchoscopic fluid from patients who met strict criteria for ventilator-associated pneumonia (Hauser et al., 2002). PAO1 is a laboratory strain of P. aeruginosa (Holloway et al., 1979), and PA14 is a human clinical isolate known to be pathogenic in both plants and mammals (Rahme et al., 2000). Escherichia coli strains JM109 (Promega, Madison, Wis.), EP1300-T1R (Epicentre, Madison, Wis.), and S17.1 (Simon et al., 1983) were used for cloning and conjugation experiments. Antibiotic concentrations and growth conditions are described below.

[0115] Mouse model of acute pneumonia. Data from experiments in which mice were infected with PSE strains were published previously (Schulert et al., 2003) and are reproduced here with permission to facilitate comparison with data from plant virulence studies. The mice were infected intranasally as previously described (Schulert et al., 2003).

[0116] Mouse survival studies were performed as previously described by Comolli et al. (Comolli et al., 1999). Briefly, bacteria grown for 17 h in MINS medium (Nicas et al., 1984) at 37° C. with shaking (250 rpm) were diluted, regrown to exponential phase, and then were washed and resuspended in phosphate-buffered saline (PBS) (Invitrogen). Six- to eight-week-old female BALB/c mice were anesthetized by intraperitoneal injection of a mixture of ketamine (100 mg/ml) and xylazine (20 mg/ml). A bacterial dose that was approximately equal to the 50% lethal dose (LD50) of PSE9 in 50 ml PBS, as determined by measuring the optical density and confirmed by plating serial dilutions onto Vogel-Bonner medium (VBM) agar, was instilled into the noses of anesthetized mice. The mice were monitored for survival or severe illness over the next 7 days. Severely ill mice, as determined by the presence of matted fur, labored breathing, and decreased activity, were euthanized and scored as dead. The experiments were performed twice, and the results were pooled.

[0117] For competition experiments, mice were inoculated as described above for the survival experiments. Inoculation was performed using approximately equal numbers (as determined by measuring the optical density and by plating to obtain viable counts) of parental strain PSE9 and a deletion mutant strain or approximately equal numbers of wild-type strain PAO1 and a PSE9 strain tagged with a gentamicin resistance cassette to allow discrimination between PSE9 and PAO1. Mice were re-anesthetized and sacrificed at 22 h post-infection. Lungs and spleens were aseptically removed prior to homogenization in 5 ml PBS. The bacterial load in each organ was determined following plating of serial dilutions on Luria-Bertani (LB) agar and LB agar supplemented with 100 μg/ml of gentamicin to distinguish PSE9 from the second bacterial strain. Colonies were counted following incubation at 37° C. for 24 h. The following formula was used to calculate the competitive index (CI) (Logsdon et al., 2003): CI=(mutant/wild-type output ratio)/(mutant/wild-type input ratio).

[0118] All experiments were approved by and performed in accordance with the guidelines of the Northwestern University Animal Care and Use Committee.

[0119] Lettuce infection model. The lettuce infection model was adapted from the model described by Rahme and colleagues (Rahme et al., 1997). Briefly, P. aeruginosa strains were grown to saturation in LB broth at 37° C. Cultures were then diluted 1:200 in fresh LB broth and grown for an additional 3 to 4 h. The resulting log-phase cultures were diluted in 10 mM MgSO4 to obtain an optical density at 600 nm of 0.2. Romaine lettuce leaves were purchased from a local supermarket, washed in 0.1% bleach, rinsed with water, and then placed in a plastic container lined with Whatman paper impregnated with MgSO4. A pipette tip was used to puncture the lettuce midrib and inoculate 10 μl of a diluted culture. The leaves were incubated at 30° C. in a humid environment for 4 days, after which the length and width of the region of soft rot were measured. The area of soft rot was estimated using the following formula: A=0.25π×l×w, where A is area of tissue damage, l is the length, and w is the width. Each strain was inoculated in triplicate. The area of soft rot caused by each P. aeruginosa isolate inoculated was compared to the area of soft rot caused by PA14 inoculated adjacently to control for leaf-to-leaf variation. In certain experiments, the number of CFU present within a lettuce lesion was determined by a method adapted from the method of Dong et al. (Dong et al., 1991). Briefly, after 4 days the infected region of a lettuce leaf was cut from the midrib and macerated in 5 ml of 10 mM MgSO4 with a mortar and pestle. Serial dilutions were plated on LB agar for enumeration of bacterial CFU following incubation at 37° C. for 24 h.

[0120] Subtractive hybridization. Bacterial genomic DNA was purified from P. aeruginosa strains PSE9 and PAO1 using Genomic-Tip 500/G columns (Qiagen, Valencia, Calif.) by following the manufacturer's instructions. Subtractive hybridization was then performed using the PCR-Select bacterial genome subtractive hybridization approach (Clontech, Mountain View, Calif.). Subtractive hybridization was performed as directed by the manufacturer except for the following changes. Genomic DNA was ethanol precipitated with a linear acrylamide carrier (Bio-Rad, Hercules, Calif.) (Gaillard et al. (1990)). The primary PCR mixture was incubated at 72° C. for 5 min to allow filling of the adapter overhangs before incubation at 94° C. for 30 s, at 56° C. for 30 s, and at 72° C. for 90 s for 25 cycles. The secondary PCR mixture was heated to 72° C. before addition of Taq polymerase. The sample was then incubated at 94° C. for 30 s, at 58° C. for 30 s, and at 72° C. for 90 s for 15 cycles. PCR products were purified using the QIAquick PCR purification approach (Qiagen).

[0121] Generation of the subtractive hybridization library. Subtractive hybridization products were ligated to the pGEM-T T/A cloning vector (Promega) at 4° C. overnight (Sambrook et al., 1989). Transformation was performed by adding 2 μl of a ligation mixture to JM109 competent cells (Sambrook et al., 1989), and transformants were selected for by growth on LB agar supplemented with ampicillin (50 μg/μl), isopropyl-β-d-thiogalactopyranoside (IPTG) (50 μg/μl), and 5-bromo-4-chloro-3-indolyl-β-d-galactopyranoside (X-Gal) (50 μg/μl; Sigma-Aldrich, St. Louis, Mo.). Following growth in LB broth supplemented with ampicillin (50 μg/μl), plasmid DNA was purified from selected transformants using a spin column technique (Qiagen). Plasmid DNA was digested with BglI for 1 h at 37° C. and then screened to determine the presence of an insert and the insert size following electrophoresis through a 0.8% agarose gel. Plasmids containing inserts were sequenced by the University of Chicago Cancer Research Center DNA Sequencing Facility (Chicago, Ill.).

[0122] PSE9 genomic library. To generate a PSE9 genomic library, the fosmid vector pSB100 was first constructed as follows. The 4.35-kb DrdI fragment of plasmid mini-CTX1 (Hoang et al., 2000), which encodes tetracycline resistance, has an oriT site for mating into P. aeruginosa, and has an attP site and integrase gene for integration into an intergenic chromosomal attB site on the P. aeruginosa chromosome, was purified. This fragment was treated with the DNA polymerase Klenow fragment (New England Biolabs, Beverly, Mass.) along with each deoxynucleoside triphosphate at a concentration of 33 μM to generate blunt ends and was ligated into the blunt Eco72 I site of the fosmid pCC1FOS (Epicentre) to generate pSB100. The pCC1 FOS vector contributed chloramphenicol resistance and cos, ori2, and oriV sites to pSB100. ori2 is the E. coli F-factor single-copy origin of replication, and oriV is an inducible high-copy-number origin of replication. These ori sites allowed pSB100 to be maintained as a low-copy-number fosmid yet to be induced to high copy numbers to facilitate fosmid DNA purification.

[0123] To construct a fosmid library of PSE9 genomic DNA fragments, the vector pSB100 was digested with XhoI, and overhangs were partially filled with dTTP and dCTP to generate ends with 5′ TC overhangs. PSE9 genomic DNA was purified as described above, and 1 μg of DNA was partially digested with 0.3 U of Sau3AI (New England Biolabs) at 37° C. for 1 h, which was followed by heat inactivation for 20 min at 60° C. To generate DNA fragments with GA 5′ overhangs compatible with the TC 5′ overhangs of the modified pSB100 fosmid vectors, 2.5 U of the DNA polymerase Klenow fragment was added, and the reaction mixture was incubated at 25° C. for 15 min in the presence of 33 mM dATP and dGTP. The reaction was terminated by addition of 1.5 μl of 0.2 M EDTA and by heat inactivation at 75° C. for 15 min. Following electrophoresis of eight of the reaction mixtures described above through a 0.6% low-melting-point agarose gel, DNA fragments that ranged from 25 to 40 kb long were extracted from the gel using the GELase enzyme preparation (Invitrogen, Carlsbad, Calif.). Extracted DNA was precipitated with ethanol.

[0124] The digested vector and insert were ligated by incubation with Fast-Link DNA ligase (Epicentre) at room temperature for 2 h. The ligation reaction mixture was then incubated with MaxPlax lambda packaging extract (Epicentre) and transduced into E. coli strain EPI300-T1R (Epicentre). Bacteria were plated on LB agar supplemented with chloramphenicol (12.5 μg/μl). A total of 960 colonies were individually inoculated into the wells of 96-well plates containing 150 μl/well LB broth supplemented with glycerol (7.5%) and chloramphenicol (12.5 μg/μl). Ten 96-well plates were incubated at 37° C. overnight in a nonshaking incubator and then stored at −80° C.

[0125] To assess the quality of the fosmid library, fosmid DNA was isolated from 25 randomly selected clones. The DNA was digested with HindIII, and the restriction digestion patterns were examined following electrophoresis through an agarose gel (0.8%). From the restriction pattern of these fosmid clones, it was estimated that the fosmid insert sizes were between 30 kb and 40 kb. Conservatively assuming an average insert size of 30 kb, a library of this size would be predicted to have a 99% probability of containing any particular genomic sequence.

[0126] Screening the fosmid library for subtractive hybridization sequences. Fosmid library clones containing subtractive hybridization sequences were detected using a three-tiered PCR-based screening approach (see FIG. 8). In the first screening step, PCR amplification using primers specific for subtractive hybridization products (see Table 3) was performed with pools of fosmid clones, each pool consisted of all the fosmid clones from a 96-well plate. Fosmid pools were created by replica plating the stocks onto LB agar supplemented with chloramphenicol (12.5 μg/ml), followed by incubation overnight at 37° C. Pools of bacteria were collected directly from the plates by washing with STET buffer (0.1 M NaCl, 10 mM Tris, 1 mM EDTA, 5% Triton X-100) and centrifugation at 18,000×g. Pools of DNA were then isolated using a column spin technique (Qiagen). Thus, the entire 960-member fosmid library was represented by 10 pools of DNA, which were used as templates for the PCRs. The reaction mixtures were incubated at 94° C. for 30 s, at 52° C. for 30 s, and at 72° C. for 45 s for 25 cycles. In the second screening step, 12 fosmid pools were created using the eight clones from each column of wells in each 96-well plate that had tested positive in the first step of the screen. PCR amplification was then performed to identify which column pool contained the clone of interest. Thus, the location of the library clone containing a specific subtractive hybridization sequence was narrowed to a column of a 96-well plate by screening 12 pools. In the final step of the screening process, each of the eight individual clones from the identified column pool was individually screened by PCR amplification. In this way, the entire fosmid library was rapidly screened for the presence of subtractive hybridization sequences.

[0127] Sequencing of fosmids. To obtain the sequences of the inserts in fosmids containing subtractive hybridization sequences, the EZ::TN<KAN-2> transposon-mediated sequencing approach was used (Epicentre). Briefly, 0.05 pmol of transposon EZ::TN<KAN-2> (provided by the manufacturer) and 2 μg of fosmid DNA were incubated with EZ::TN transposase (provided by the manufacturer) at 37° C. for 2 h. The reaction was terminated with stop solution (provided by the manufacturer), and 1 μl of the reaction mixture was electroporated into electrocompetent E. coli EP1300-T1R cells (Epicentre). Electroporated E. coli cells were plated onto LB agar supplemented with kanamycin (50 μg/ml). Colonies were inoculated into 1 ml LB broth supplemented with kanamycin (50 μg/ml) and grown overnight. Cultures were added to 9 ml of LB medium supplemented with chloramphenicol (12.5 μg/ml) and 10 μl CopyControl induction solution (provided by manufacturer), which induces fosmids to high copy numbers, and shaken at 37° C. for 5 h. Fosmid DNA was purified using a spin column approach (Qiagen). Primers hybridizing to the borders of the transposon were used to sequence the DNA flanking the transposon insertion site (primer KAN-2 FP-1, ACCTACAACAAAGCTCTCATCAACC (SEQ ID NO:256); primer KAN-2 RP-1, GCAATGTAACATCAGAGATTTTGAG (SEQ ID NO:257)), and primer walking was used to fill in sequence gaps. Sequencing was performed by SeqWright (Dallas, Tex.) and by the University of Chicago Cancer Research Center DNA Sequencing Facility. Sequences not present in the fosmid library were obtained by PCR amplification of chromosomal DNA using the Advantage-GC genomic polymerase mixture (Clontech). Each strand of DNA was sequenced one or two times.

[0128] Sequence assembly, annotation, and analysis. Contiguous sequences were assembled using Vector NTI Contig Express (InforMax, Inc., Frederick, Md.). Open reading frames (ORFs) in genomic island sequences were predicted using GenDB (Meyer et al., 2003) and GeneMark (Lukashin et al., 1998), and the G+C content was calculated by using Vector NTI BioPlot (InforMax, Inc.) from a sliding 100-bp window. Nucleotide and amino acid sequence similarities were identified using BLASTN and BLASTP, respectively (Altschul et al., 1990), and sequences were aligned using Vector NTI AlignX (Informax, Inc.).

[0129] Construction of the PAGI-5 deletion mutant. PSE9 mutants with deletion of novel region I (NR-I) of PAGI-5 (PSE9ΔNR-I) or novel region II (NR-II) of PAGI-5 (PSE9ΔNR-II) were created by homologous recombination using a variation of the method of Schweizer and Hoang (Schweizer et al., 1995). PCR primers were designed to amplify 500 to 700-bp fragments of the 5′ and 3′ ends of PAGI-5 NR-I and NR-II. These PCR fragments were engineered to have NgoMIV restriction sites on the exterior side and XmaI sites on the interior side. These PCR products were digested with NgoMIV and XmaI and sequentially cloned into the XmaI site of pEX100T (Schweizer et al., 1995). After PCR was used to confirm the correct orientation of the cloned fragments, the 2.3-kb XmaI digestion product of pX1918G (Schweizer et al., 1995), which contained a gentamicin resistance cassette, was cloned into the Xmal site between the two fragments, creating deletion vectors pPG5NRI-5G3 and pPG5NRII-5G3. The deletion vectors were transformed into E. coli S17.1 and then mated into PSE9 (Schweizer et al., 1995). Selection for vector integration into the PSE9 genome was obtained by growth on VBM (Vogel et al., 1956) agar supplemented with 100 μg/ml gentamicin. Gentamicin-resistant colonies were transferred to VBM agar supplemented with 100 μg/ml gentamicin and 5% sucrose to induce a second recombination event that resulted in deletion of the targeted region as well as the vector backbone, which included the sacB sucrose sensitivity gene. PCR was used to screen gentamicin- and sucrose-resistant colonies for the presence of the gentamicin resistance cassette (X1918G-GentF, CGCAGCAGCAACGATGTTACGC (SEQ ID NO:258); X1918G-GentR, CGCGTTGGCCTCATGCTTGA (SEQ ID NO:259); X1918G-XylF, TCGAATTCCTCCGCGAGAGC (SEQ ID NO:260); X1918G-XylR, AAATCCATGCCCGGCTCGTC (SEQ ID NO:261)) and deletion of NR-I (PAGI5-5Gupstream, GCACGTTGCCAGATGTTCTCC (SEQ ID NO:262); PAGI5-5Gdownstream, GGCAGAAATGGCTGCGTTCG (SEQ ID NO:263)) and NR-II (PAGI5-MGupstream, CGATTCAAGCGAGCCAGGATC (SEQ ID NO:264); PAGI5MGdownstream, GCCACCACGTTGACAACAAGCT (SEQ ID NO:265)).

[0130] Construction of a gentamicin-resistant PSE9 strain. To distinguish PSE9 from PAO1 in competition experiments, it was necessary to tag PSE9 with a chromosomal copy of a gentamicin resistance cassette. The 2.3-kb XmaI fragment from pX1918G (Schweizer et al., 1995) containing the gentamicin resistance cassette was cloned into the Xmal site of mini-CTX1 (Hoang et al., 2000). The resulting mini-CTX-Gent construct was transformed into E. coli S17.1 and mated into wild-type strain PSE9, in which it integrated into the chromosomal attB site. The vector backbone was then excised by mating pFlp2 (Hoang et al., 2000) into the strain, resulting in expression of Flp recombinase. Integration and vector excision were confirmed by PCR as described above for the PSE9ΔNR-I and PSE9ΔNR-II mutants. The absence of a virulence defect in the tagged PSE9 strain was confirmed by performing competition experiments with tagged PSE9 and parental strain PSE9 (data not shown).

[0131] Sequencing of PAGI-5. The PAGI-5 genomic island was sequenced as follows: Two of the subtractive hybridization sequences that lacked similarity to known sequences identified two overlapping fosmids. Complete sequencing of the inserts in these fosmids indicated that the novel subtractive hybridization sequences were contiguous with sequences related to PAPI-1. Rescreening the fosmid library with PCR primers designed to amplify other PAPI-1 sequences identified a third non-overlapping fosmid containing a PAPI-1 related region contiguous with PAO1 backbone sequence. Long-range PCR using PSE9 chromosomal DNA as template was utilized to amplify the sequence between the PAPI-1 related regions of the two overlapping fosmids and those of the third fosmid. Sequencing of the amplified product indicated that it contained the PAPI-1 subtractive hybridization sequence, which had not been found in the fosmid library. In this way, the complete sequence of PAGI-5 was obtained and localized within the core chromosome.

[0132] Nucleotide sequence accession number. The sequence of PAGI-5 has been deposited in the National Center for Biotechnology Information GenBank database under accession number EF611301.

[0133] Results and Discussion

[0134] Virulence in a mouse model of pneumonia. We first investigated strain-to-strain variation in the virulence of P. aeruginosa. For this purpose, a set of 35 previously collected P. aeruginosa clinical isolates designated PSE1, PSE2, PSE3, etc., was used (Hauser et al., 2002). Each of these isolates was originally cultured from patients with ventilator-associated pneumonia. The virulence of these 35 isolates was previously quantified in a mouse model of acute pneumonia by calculating the LD50 (Schulert et al., 2003). As an aid, the data are shown in FIG. 1A.

[0135] Significant strain-to-strain variation in the levels of virulence was observed, and the LD50s of the most and least virulent strains differed by almost 100-fold. The most virulent strain was PSE9, which had an LD50 of 1.3×10⁶ CFU, while the least virulent strain was PSE7, which had an LD50 of 8.8×10⁷ CFU. The laboratory strain PAO1 was used as a control and was found to have an intermediate level of virulence (LD50, 4.2×10⁷ CFU). These results confirm that strains of P. aeruginosa differ in virulence in an animal model of infection.

[0136] The difference in pathogenicity of P. aeruginosa strains suggested that some strains might possess virulence factors that other strains lack. Although the genes encoding most known P. aeruginosa virulence factors are conserved in nearly all strains (Wolfgang et al., 2003), the exoU and exoS genes, which encode effector proteins of the P. aeruginosa type III secretion system, are variable traits (Feltman et al., 2001; Fleiszig et al., 1997). For this reason, the type III secretion profile of each of the 35 strains was determined previously (Schulert et al., 2003); this analysis showed that ExoU-secreting strains as a group were indeed more virulent (FIG. 1A), but neither ExoU nor ExoS secretion explained all the differences in virulence between these strains (Schulert et al., 2003). Therefore, it was postulated that the remaining differences were due to either differential regulation of conserved virulence determinants or the variable presence of virulence-encoding genes in the accessory genomes of the strains. Subsequent experiments focused on the latter set of genes.

[0137] Virulence in a plant model of infection. Since P. aeruginosa is also a pathogen of plants (He et al., 2004; Rahme et al., 1995), the virulence of the 35 isolates was quantified using a plant model of disease. The lettuce leaf infection system developed by Rahme and colleagues was used for this purpose (Rahme et al., 1997). P. aeruginosa was inoculated into the spines of lettuce leaves, and the areas of tissue damage that developed over the ensuing 4 days were determined and used to quantify virulence (FIG. 2A). Strain P A14, a clinical isolate known to be highly virulent in plants (Rahme et al., 1995), was used as a positive control. Again, the 35 isolates differed in virulence (FIG. 2B). Whereas some strains had no apparent effect on the lettuce, other strains caused areas of tissue damage larger than those caused by strain PA14. PAO1 was relatively avirulent in this model system, producing an area of damage that was only 15% of the area of damage produced by PA14. Some of the strains that were highly virulent in the mouse model exhibited low levels of virulence in the lettuce model (e.g., PSE41), while other strains were highly virulent in the lettuce model but only slightly virulent in the mouse model (e.g., PSE7 and PSE27). Still other strains were highly virulent in both models (e.g., PSE39 and PSE4). The most virulent isolate in the mouse model, PSE9, was the 17th most virulent strain in the plant model and caused an area of damage that was just under one-half the area of damage caused by PA14. These findings confirm those of Rahme et al. (Rahme et al., 2000) and demonstrate that strains of P. aeruginosa differ in virulence in a plant model of infection. Furthermore, they are consistent with a model in which the accessory genetic material of some strains enhances virulence in animals, the accessory genetic material of other strains enhances virulence in plants, and the accessory genetic material of still other strains enhances virulence in both animals and plants.

[0138] Comparison of a highly virulent strain and a less virulent strain of P. aeruginosa using subtractive hybridization. Since PSE9 exhibited elevated levels of virulence in both the animal and plant models, it was reasoned that this strain had a high likelihood of containing a number of interesting genomic islands encoding virulence factors. For this reason, a PCR-based subtractive hybridization approach was used to identify genetic regions present in PSE9 but absent in the less virulent PAO1 strain. PAO1 was chosen as the reference strain for these experiments because of its relatively low virulence, the availability of its genomic sequence (Stover et al., 2000), and its growth rate, which was equivalent to that of PSE9 in LB medium (data not shown). A subtractive hybridization library consisting of 75 fragments of PSE9 DNA was generated, cloned, sequenced, and compared to the GenBank database (FIG. 3). One clone was found to have no insert and was removed from the library. Of the remaining 74 subtractive hybridization products, 13 (18%) were found to be nearly identical to PAO1 sequences, indicating that they were false positives. Of the 61 sequences that were not present in the PAO1 genome, 35 were similar to known sequences, whereas 26 had no significant similarity to known sequences. Based on sequence alignments, 26 sequences were determined to overlap and were therefore removed from the analysis, leaving 21 products with similarity to known sequences and 14 products without similarity to known sequences.

[0139] Of the 21 subtractive hybridization products with similarity to known sequences, 13 were nearly identical to previously sequenced P. aeruginosa genomic islands (FIG. 3 and Table 1). Twelve of these sequences were sequences from a putative serotype 01 O-antigen biosynthesis gene cluster. This cluster is 1 of 11 distinct genetic elements found in P. aeruginosa that encode the biosynthetic enzymes necessary for serotype specificity (Raymond et al., 2002). Thus, PSE9 is related to serotype 01 strains. Strain PAO1, on the other hand, carries the serotype 05 gene cluster, which is divergent from the serotype 01 cluster, explaining why the O-antigen biosynthesis gene cluster sequences were detected by subtractive hybridization. A single insert was similar to a region of the pilA gene, which encodes the pilin subunit of P. aeruginosa type IV pili (Sastry et al., 1985). The type IV pilin genes from different strains of P. aeruginosa segregate into five subclusters that are dispersed among the type IV pilin genes of gram-negative bacteria; pilA genes from different subclusters share less than 30% nucleotide identity (Spangenberg et al., 1997). For these reasons, it has been postulated that the pilA gene of P. aeruginosa was acquired by horizontal transfer. Thus, the identification of the O-antigen biosynthetic cluster and the pilA gene. validated the ability of the subtractive hybridization approach to identify genetic elements that were different in different P. aeruginosa strains. Since the O-antigen biosynthetic cluster and the pilA gene have been characterized previously (Raymond et al., 2002; Spangenberg et al., 1997), they were not further evaluated.

[0140] The eight remaining sequences that were similar to known genes had characteristics that suggested that they were parts of novel genomic islands (Table 1). One sequence was similar to an ORF found in CTX, a cytotoxin-converting phage previously isolated from P. aeruginosa strain PA158 (Hayashi et al. (1990); and Nakayama et al. (1999)). This subtractive hybridization product, however, also contained a novel sequence, suggesting that it was from a related but distinct phage. Another sequence had similarity to P. aeruginosa pathogenicity island 1 (PAPI-1) (He et al. (2004)). Note that neither the CTX phage nor PAPI-1 is present in PAO1. The remaining sequences were similar to sequences encoding site-specific recombinases, a zinc-binding transcriptional regulator, a putative phage-related DNA binding protein, and Rhs family elements.

[0141] Identification of novel genomic islands. In several cases, the subtractive hybridization products appeared to have identified a small portion of a larger genomic island. Therefore, these sequences were used as tags to identify and characterize the entire genomic island, as well as the DNA flanking the island. To accomplish this, a genomic library of strain PSE9 was constructed using the fosmid vector pSB100, and PCR primers designed to amplify subtractive hybridization products were used to screen the library for individual fosmid clones that contained these sequences (see Materials and Methods). Using this approach, the fosmid library was screened for the presence of the 14 subtractive hybridization products with no similarity to known genes, as well as the eight sequences with similarity to genes not found in PAO1 (FIG. 3). Of these 22 sequences, 20 were represented in the library. The two sequences that were not detected were a clone with similarity to an Rhs family gene and a clone with similarity to PAPI-1. Overall, 25 fosmid clones that contained at least 1 of the 20 subtractive hybridization sequences were identified. A subset of nine fosmid clones cumulatively contained all 20 of the subtractive hybridization sequences and was used in subsequent analyses.

[0142] Sequencing of a large PSE9 genomic island. To further characterize the PSE9-associated genomic islands, the complete nucleotide sequence of the subset of nine fosmid clones containing all 20 subtractive hybridization products was obtained. Overall, this analysis suggested that the set of fosmid inserts analyzed represented seven distinct genomic islands located at different sites in the P. aeruginosa genome (data not shown). Here, the largest of these novel islands is characterized.

[0143] The inserts of three fosmids were determined to contain portions of a single large genomic island with similarity to PAPI-1. The complete sequence of this island was obtained. Since this island differed substantially from PAPI-1 (see below), it was given a unique name. Using the nomenclature system of Liang et al. (2001), Larbig et al. (2002), and Klockgether et al. (2004), who identified PAGI-1, PAGI-2, PAGI-3, and PAGI-4, this large island was designated “PAGI-5.”

[0144] PAGI-5 is the largest of the genomic islands identified in PSE9; it is 99,276 bp long. Its G+C content is 59.6%, which is lower than the PAO1 overall genome G+C content, 66.6% (Stover et al. (2000)). This island is predicted to contain 121 ORFs and is integrated into the genome immediately adjacent to a tRNALys gene (PA0976.1) at bp 1,061,197 in the core chromosome. (PAO1 gene designations are used throughout this paper (Stover et al. (2000).) tRNA genes frequently serve as integration sites for prokaryotic genomic islands (Williams 2002), and this P. aeruginosa tRNA gene is no exception. It serves as the insertion site for PAPI-1, PAPI-2, pKLK106, and PAGI-4 (Kiewitz et al. (2000); Klockgether et al. (2004); and Qui et al. (2006)).

[0145] Based on sequence comparisons, PAGI-5 is related to a known family of P. aeruginosa genomic islands that includes PAPI-1, PAPI-2, ExoU islands A, B, and C, and an unnamed 8.9-kb tRNALys-associated island in strain PAO1 (He et al. (2004); Klockgether et al. (2004); and Kulasekara et al. (2006)). These islands themselves comprise a subset of a large family of pKLC102-related genomic islands prevalent in beta- and gammaproteobacteria (Klockgether et al. (2007)). The members of the pKLC102 family of genomic islands are plasmid-phage hybrids that consist of two parts: a relatively conserved core set of genes involved in propagation, replication, and partitioning, and variable “cargo” gene cassettes (Klockgether et al. (200); Klockgether et al. (2007); and Wurdemann et al. (2007)). Kulasekara et al., (2006) proposed that the PAPI-1-related islands evolved from an ancestral integrative plasmid similar to pKLC102. According to their model, during evolution these related elements diverged into two clades, which can be distinguished by the presence of the genes encoding the type III effector protein ExoU and its chaperone SpcU. In one clade, consisting of PAPI-2 and ExoU islands A, B, and C, the exoU and spcU genes are present, but additional rearrangements during or following integration led to loss of the partitioning factor gene of the pKLC102-like plasmid (Kulasekara et al. (2006)). The loss of this plasmid feature may have fixed the island into the chromosome (Kulasekara et al. (2006)). Consistent with this model is the finding that each of these islands is integrated into the same tRNALys gene (PA0976.1). The second clade consists of PAPI-1 and an 8.9-kb tRNALys-associated island of strain PAO1, which evolved from a lineage of the ancestral plasmid that did not acquire (or lost) the exoU and spcU genes. PAPI-1 has maintained the features of the integrated plasmid and has been shown to be transferable (Qiu et al. (2006)). As a result, PAPI-1 can integrate into either of the two tRNALys genes (PA4541.1 and PA0976.1) present in the P. aeruginosa genome (Qiu et al. (2006)). It is not surprising that some members of this clade can integrate into either of these sites, since the pKLC102-like plasmid pKLK106 has been shown to integrate into either site (Kiewitz et al. (2000); and Klockgether et al. (2004)). PAGI-5 appears to be another member of the second clade, since it also does not contain the exoU and spcU genes. PAGI-5 is integrated into the tRNALys gene PA0976.1 in PSE9; additional studies are necessary to determine whether this island is also transferable and can be found in the tRNALys gene PA4541.1 in other strains. PCR analysis indicated that the integration site in the PA4541.1 tRNALys gene of PSE9 is unoccupied (data not shown). Interestingly, like PAPI-1, PAGI-5 contains an intact partitioning factor gene (5PG121), suggesting that it may be transferable.

[0146] Of this group of related genomic islands, PAGI-5 is most similar to PAPI-1; 79 of the 121 predicted PAGI-5 ORFs share similarity to PAPI-1 ORFs (FIGS. 4 and 5; see Table 2). Yet PAGI-5 carries a substantial amount of genetic information that is not present in PAPI-1 and also lacks a number of PAPI-1 ORFs. Since PAPI-1 has been thoroughly described previously (He et al. (2004)), the features of PAGI-5 that differ from features of PAPI-1 are highlighted (FIGS. 4 and 5). A 14.8-kb region of PAPI-1 containing 11 ORFs (RL036 to RL046) is not present in PAGI-5. Two other large regions of PAPI-1 are also missing from PAGI-5, but both of these regions are replaced in PAGI-5 with novel DNA sequences. A 6.2-kb region containing seven PAPI-1 ORFs (RL004 to RL010) is replaced by an 8.5-kb sequence, which is referred to as NR-I. NR-I contains five ORFs (5PG3 to 5PG7), four without similarity to previously characterized genes and one (5PG4) that shares 25% identity with a putative methylase gene from Bacillus cereus. This region of PAGI-5 has a G+C content of 50.5%, which is considerably lower than the G+C content of PAGI-5 as a whole (59.6%), suggesting that its origins are distinct from those of the remainder of PAGI-5 (FIG. 4). A central 7.8-kb PAPI-1 region containing ORFs RL053 to RL062 is replaced in PAGI-5 by a 17.9-kb sequence, which is referred to as NR-II. NR-II contains 23 predicted ORFs (5PG40 to 5PG62) and has a G+C content of 56.6%. The first part of this region contains nine predicted ORFs that lack similarity to any previously characterized sequences. These ORFs are followed by an ORF (5PG49) that shares 99% identity with an ORF from P. aeruginosa strain C3719, which is predicted to encode an SOS response transcriptional repressor due to the presence of a region similar to a LexA domain (COG1974) (Fogh et al. (1994)). The 5PG49 and C3719 ORFs both share only 46% similarity and 32% identity overall with the ORF encoding PAO1 LexA (PA3007), the canonical SOS response repressor (Garriga et al. (1992)). The next ORF has apparently served as the integration site for a small genetic element (FIG. 4). This ORF, whose product is similar to a nucleotidyltransferase, is split into two separate ORFs (5PG50 and 5PG62) that flank the putative genetic element. Consistent with this interpretation is the finding that a region similar to 5PG50 and 5PG62 (along with 5PG43 to 5PG49) but lacking the inserted genetic element is present in strain C3719. The element itself consists of 11 ORFs, including ORFs encoding a predicted recombinase and two predicted integrases that are between 28% and 40% identical to the products of three predicted ORFs of Burkholderia multivorans. The presence of multiple ORFs associated with mobile elements suggests that these 11 ORFs had an evolutionarily distinct origin, which is supported by the presence of a region 99% identical to 5PG51 to 5PG61 in P. aeruginosa strain PA7. Also present in this genetic element is an ORF similar to ORFs encoding members of the TetR family of transcriptional regulators, which typically repress gene expression in response to environmental cues (Ramos et al. (2005)). The TetR regulator gene and an adjacent integrase gene are similar to a regulator-integrase gene pair found in P. aeruginosa plasmid pKLC102. In pKLC102 these ORFs are followed by ORFs encoding a putative short-chain dehydrogenase/reductase protein and another TetR regulator protein; in PAGI-5 they are instead adjacent to a cluster of ORFs (5PG56 to 5PG61) similar to a 4-kb fragment of the Pseudomonas mercury resistance transposon Tn5041 (Kholodii et al. (1997); and Larbig et al. (2002)). This cluster includes ORFs encoding homologs of the following proteins: MerR (transcriptional regulator of the CueR family), MerT (mercuric ion transport), MerP (periplasmic mercuric ion binding), MerC [inner membrane Hg(II) uptake], MerA (mercuric ion reductase), and ORFY (hypothetical protein). Thus, PAGI-5 has the potential to confer mercury resistance.

[0147] There are other minor differences between PAGI-5 and PAPI-1. For example, in place of RL013 of PAPI-1, PAGI-5 carries IS407, an insertion sequence that contains two ORFs (5PG10 and 5PG11) predicted to encode transposases. Interestingly, all or portions of IS407 are also found in ExoU islands A, B and C, where the sequence is adjacent to the exoU and spcU genes. In contrast, in PAGI-5 and the 8.9-kb genomic island associated with the PAO1 PA0976.1 tRNALys gene, the IS407 sequences are not associated with the exoU and spcU genes, which are not present in these islands. PAPI-1 lacks both IS407 and the exoU and spcU genes (He et al. (2004)). The close association between IS407, this group of genomic islands, and the exoU and spcU genes suggests that this insertion sequence played a role in either the acquisition or loss of the exoU and spcU genes from the ancestor of these elements (Kulasekara et al. (2006)).

[0148] Despite these differences, the majority of PAGI-5 is similar to PAPI-1 and even to the less closely related ExoU island A (FIG. 5). For example, ORFs 5PG12 to 5PG39 are conserved in all three islands and appear to involve plasmid-related functions. A subset of these ORFs (5PG21 to 5PG29) is similar to a cluster of genes from PKLC102 (CP73 to CP81) that are conserved in other tRNALys-associated islands in multiple species (Klockgether et al. (2007)). Likewise, ORFs putatively encoding an integrase (5PG1), a plasmid stabilization protein (5PG8), a transcriptional regulator (5PG9), a helicase (5PG63), and a methyltransferase (5PG64) are present in all three islands. These conserved regions are consistent with a common ancestry.

[0149] Distribution of PAGI-5 in clinical isolates. As mentioned above, PAGI-5 appears to be a chimeric genomic island consisting of three PAPI-1-related regions and two novel regions (designated NR-I and NR-II) (FIG. 5). To determine the frequency and distribution of these regions among P. aeruginosa strains, a collection of 35 clinical isolates were screened for the for the presence of NR-I, NR-II, and the large PAPI-1-like regions in the center and in the 3′ end of PAGI-5 (FIG. 1B). PCR was used to amplify a sequence within each of these regions in each isolate (FIG. 5). Amplified products from the central and 3′ PAPI-1 conserved regions were observed in 34 (97%) of the 35 clinical isolates (FIG. 1B), consistent with previous reports indicating that PAPI-1-related islands are common among P. aeruginosa strains (Klockgether et al. (2007)). In contrast, amplification of sequences within the novel NR-I and NR-II regions was observed only in highly virulent isolates. Specifically, the NR-I sequence was observed only in PSE9 itself, the most virulent of the 35 isolates, and the NR-II sequence was observed only in seven of the most virulent isolates (FIG. 1B). The presence of NR-II exclusively in highly virulent isolates suggested that it contributed directly to the increased pathogenicity of these isolates or was genetically associated with other factors that contributed.

[0150] The novel regions of PAGI-5 encode virulence determinants. To examine the role of NR-I and NR-II of PAGI-5 in virulence, two PSE9 deletion strains were created by homologous recombination (see Materials and Methods). The first mutant strain, PSE9ΔNR-I, had a deletion of bp 3712 to 9342 within NR-I, disrupting or deleting ORFs 5PG4 to 5PG7. The second mutant strain, PSE9ΔNR-II, had a deletion of bp 37,564 to 54,397 of NR-II, disrupting or deleting ORFs 5PG40 to 5PG62. In both strains, the deleted sequences were replaced with gentamicin resistance cassettes. Neither PSE9ΔNR-I nor PSE9ΔNR-II exhibited a growth defect in minimal medium (data not shown).

[0151] The importance of NR-I and NR-II to the virulence of PSE9 was then determined using the deletion mutants in the mouse model of acute pneumonia. Mice were inoculated by nasal aspiration with PSE9ΔNR-I, PSE9ΔNR-II, parental strain PSE9, or PAO1, and survival was monitored over the subsequent 7 days. Nearly all mice inoculated with parental strain PSE9 died during the course of the experiment, whereas all of the PAO1-infected mice survived (FIG. 6). The survival curve for mice inoculated with PSE9ΔNR-I resembled that for mice inoculated with parental strain PSE9, indicating that NR-I did not have a major effect on the survival of mice in the acute pneumonia model. In contrast, the mice infected with PSE9ΔNR-II had significantly improved survival compared to the mice infected with parental strain PSE9 (P=0.0036). These results indicate that NR-II of PAGI-5 contributes to the highly virulent phenotype of PSE9.

[0152] Next, the virulence of the NR-I and NR-II mutants was measured using competition assays, which can detect small differences in virulence between two strains. Mice were inoculated by nasal aspiration with a mixed dose of PSE9ΔNR-I and parental strain PSE9 or with a mixed dose of PSE9ΔNR-II and parental strain PSE9, and the amounts of viable bacteria present in the lungs and spleen were determined after 22 h of infection. Deletion of either NR-I or NR-II resulted in modest but statistically significant decreases in competitive fitness; the mean CIs were 0.56 and 0.37 in the lungs and 0.35 and 0.33 in the spleens, respectively (FIG. 7). In comparison, wild-type strain PAO1 had mean CIs of 0.15 in the lungs and 0.16 in the spleens when it competed against PSE9 (FIG. 7). The finding that there was a substantial difference in virulence between PSE9ΔNR-I and PSE9ΔNR-II in survival assays but there was only a small difference in competition assays may reflect a threshold below which virulence is undetectable in survival assays but apparent in competition assays. Alternatively, the true virulence defect of PSE9ΔNR-II may be masked in competition assays by the “complementing” effect of coinoculated parental strain PSE9. Together with the results of the survival experiments, these results indicate that NR-II of PAGI-5 makes a substantial contribution to the virulence of PSE9, whereas NR-I makes a more modest contribution.

[0153] The NR-I and NR-II mutants were also tested using the lettuce leaf model. After 4 days, no difference in either the area of tissue damage or bacterial survival was detected between parental strain PSE9 and either of the mutants (data not shown). Thus, factors other than PAGI-5 NR-I and NR-II must contribute to the virulent phenotype of PSE9 in the lettuce leaf model.

[0154] Synopsis. The approach of targeting a highly virulent strain as a source of novel pathogenicity islands in P. aeruginosa has led to identification of seven novel genomic islands, at least one of which is a pathogenicity island. PAGI-5 is a 99-kb hybrid island that is related to the PAPI-1 family of islands but has two large regions with novel sequences, NR-I and NR-II. Deletion of NR-II resulted in a marked decrease in the virulence of parental strain PSE9, and deletion of NR-I resulted in a modest decrease in virulence. Thus, both these regions encode novel virulence determinants that enhance the pathogenicity of PSE9 and are examples of factors responsible for strain-to-strain variation in P. aeruginosa virulence. Examination of other highly virulent strains may lead to identification of additional novel pathogenicity islands in P. aeruginosa, as well as in other bacteria. The advent of relatively inexpensive whole-genome sequencing should greatly facilitate these studies and enable more complete identification of the full arsenal of virulence factors available for use by P. aeruginosa.

### Example 2

[0155] Reference is made to the scientific article Battle et al., “Genomic Islands of Pseudomonas aeruginosa,” FEMS Microbiol. Lett. 2009 January; 290(1):70-8. Epub 2008 Nov. 18, the content of which is incorporated herein by reference in its entirety.

### SUMMARY

[0156] Key to Pseudomonas aeruginosa's ability to thrive in a diversity of niches is the presence of numerous genomic islands that confer adaptive traits upon individual strains. We reasoned that P. aeruginosa strains capable of surviving in the harsh environments of multiple hosts would therefore represent rich sources of genomic islands. To this end, a strain, PSE9, was identified that was virulent in both animals and plants. Subtractive hybridization was used to compare the genome of PSE9 with the less virulent strain PAO1. Nine genomic islands were identified in PSE9 that were absent in PAO1; seven of these had not been described previously. One of these seven islands, designated P. aeruginosa genomic island (PAGI)-5, has already been shown to carry numerous interesting ORFs, including several required for virulence in mammals. Here, the remaining six genomic islands, PAGI-6, -7, -8, -9, -10, and -11, which include a prophage element and two Rhs elements, are characterized.

[0157] Materials and Methods

[0158] Construction and screening of a PSE9 fosmid library. Construction of the fosmid library of PSE9 genomic DNA has been described previously (Battle et al., 2008). The complete library was stored in ten 96-well plates. These plates were screened for the presence of subtractive hybridization sequences by PCR amplification using primers corresponding to the sequences (Table 10). A three-tiered screening method was used, as described previously (Battle et al., 2008).

[0159] Sequencing of fosmids. Inserts in fosmids identified as containing subtractive hybridization products were sequenced using the EZ□TN <KAN-2> transposon-mediated sequencing approach (Epicentre) as described previously (Battle et al., 2008).

[0160] Sequence assembly, annotation, and analysis. Vector NTI Contig Express (inforMax Inc., Frederick, Md.) was used to assemble contiguous sequences. ORFs were identified using GENDB (Meyer et al., 2003) and GENEMARK (Lukashin & Borodovsky, 1998). The G+C content was calculated by a Vector NTI BIOPLOT (InforMax Inc.) from a sliding 100 bp window. BLASTN and BLASTP were used to identify nucleotide and amino acid sequence similarity, respectively (Altschul et al., 1990). Vector NTI ALIGNX (Informax Inc.) was used to align sequences. The dense alignment surface transmembrane prediction method was used to identify potential transmembrane domains (Cserzo et al., 1997). Primers used to identify PAGI sequences in PSE strains are shown in Table 11.

[0161] Nucleotide sequence accession number. The sequences of PAGI-6, -7, -8, -9, -10, and -11 have been submitted to the National Center for Biotechnology Information (NCBI) gene bank under the accession numbers EF611302, EF611303, EF611304, EF611305, EF611306, and EF611307, respectively.

[0162] Results and Discussion

[0163] Identification of fosmids containing PSE9 genomic islands. As mentioned, subtractive hybridization of PSE9 with PAO1 had yielded 22 PSE9 sequences that did not correspond to characterized PAGIs (Battle et al., 2008). Three of these sequences were used to identify PAGI-5 (Battle et al., 2008). The remaining 19 sequences were used to screen a fosmid library of PSE9 genomic DNA to identify fosmids that contained these sequences. The library was screened as pools using primers designed to amplify subtractive hybridization sequences by PCR. One of the sequences was not present in the library, but the remaining 18 sequences were all found between one and five times. A number of different subtractive hybridization sequences were found together on each of several different fosmid clones, suggesting that they were contained within the same genomic island. Overall, 23 fosmid clones that contained at least one of the 18 subtractive hybridization sequences were identified. A subset of seven fosmid clones cumulatively contained all 18 of the subtractive hybridization sequences. This subset of clones was used in subsequent analyses.

[0164] Location of novel genomic islands. The locations of the identified genomic islands within the P. aeruginosa chromosome were determined. Primers were designed to hybridize to the fosmid backbone sequence flanking the insert cloning site to allow sequencing of the ends of each PSE9 genomic insert. Sequencing analysis was then performed. In five of seven fosmids, the PAO1 sequence was found at both ends of the fosmid insert, and the remaining two had PAO1 sequence at one end, allowing placement of the insert in the Pseudomonas aeruginosa core genome. The proximity of the flanking PAO1 sequence found in the latter two fosmids indicated that they represented opposite ends of a single genomic island. Overall, this analysis suggested that the set of analyzed fosmid inserts represented six distinct genomic islands located at different sites in the Pseudomonas aeruginosa genome (Table 4 and FIG. 14).

[0165] Sequencing of PSE9 genomic islands. To further characterize the PSE9 genomic islands, the complete nucleotide sequence of the subset of fosmids containing all 18 subtractive hybridization products was obtained. In cases in which the PSE9 genomic island extended beyond the end of the fosmid insert, PCR primers were designed to amplify a sequence at the border of the insert, and the fosmid library was rescreened for the presence of this sequence. In this way, the complete sequence of each PSE9 genomic island was obtained. Altogether, six distinct genomic islands varying in size from 44 to 2 kb were identified (Table 4). Using the nomenclature system of Liang et al. (2001), Larbig et al. (2002), Klockgether et al. (2004), and Battle et al. (2008) who identified PAGIs -1, -2, -3, -4, and -5, these six novel genomic islands were named PAGI-6, -7, -8, -9, -10, and -11 (Table 4). Each island was in turn annotated.

[0166] PAGI-6. The first genomic island, PAGI-6, is 44 302 bp in size and has a G+C content of 60.6%, 6% less than that of the overall genome of P. aeruginosa (FIG. 9). It is integrated into a site immediately flanking a tRNA^{Thr} gene (PA5160.1) between genes annotated to encode a drug efflux transporter (PA5160) and a dTDP-D-glucose 4,6-dehydratase (PA5161). [Unless otherwise noted, PAO1 gene designations will be used throughout this discussion (Stover et al., 2000).] PAGI-6 has many large regions highly similar to φCTX, a cytotoxin-converting phage isolated from P. aeruginosa strain PA158 (Nakayama et al., 1999). φCTX is a member of the Pseudomonas aeruginosa R-pyocin-related family of phages (Hayashi et al., 1994). As their name implies, these phages have similarities to R-pyocin-type bacteriocins (Shinomiya & Ina, 1989), bacterially derived proteins with antimicrobial properties (Riley & Wertz, 2002). It has been proposed that R-pyocins are defective phages that have been evolutionarily selected to function as bacteriocins (Nakayama et al., 2000). Thus, PAGI-6 appears to be or to have evolved from a prophage. Interestingly, PAGI-6 and φCTX have different chromosomal locations; in PSE9, PAGI-6 is integrated into the tRNA^{Thr} gene PA5160.1, but in Pseudomonas aeruginosa strain PA158 the φCTX phage genome is integrated into tRNA^{Ser} gene PA2603.1 (Hayashi et al., 1993), neither of which were previously identified as RGPs (Mathee et al., 2008).

[0167] PAGI-6 is somewhat larger than the genome of φCTX, which is 35 538 bp in size, but both elements are relatively conserved over the majority of their sequences (FIG. 10). Notable differences include the absence of φCTX cytotoxin and φCTX integrase genes (ctx and int) from PAGI-6, and the presence of the 7403 bp segment of DNA that follows the attR site of PAGI-6 containing two predicted integrase genes and a stretch of DNA devoid of ORFs, except for a small 99 bp predicted ORF.

[0168] In both PAGI-6 and φCTX, sequences from 2,345 bp to 34,086 bp encode a number of putative phage-related structural and enzymatic proteins (FIGS. 9 and 10, Table 6). Despite this overall similarity, there are some interesting differences between these two elements (FIGS. 9 and 10). Like the φCTX genome, PAGI-6 is predicted to contain 47 ORFs, but only 36 of the PAGI-6 ORFs are similar to φCTX ORFs. The remaining 11 φCTX ORFs are not present in PAGI-6; these include φCTX ORFs 7, 12.5, 15, 28, 29, 32, 35, 40, 43, as well as the integrase-encoding gene (int) and, importantly, the cytotoxin gene itself (ctx). Nakayama and colleagues have postulated that some of these ORFs (e.g. ORF 15, 28, 29, and ctx) were not part of the ancestral φCTX genome (Nakayama, et al., 1999). Their absence from PAGI-6 further supports this supposition.

[0169] In the φCTX genome, ctx is found at the beginning of the element, between the cohesive end (cos) site and ORF1 (FIG. 10). Whereas the φCTX genome as a whole has a G+C content of 62.6%, the ctx gene has a lower G+C content (53.8%), suggesting its origin is distinct from that of the remainder of φCTX (Hayashi, et al., 1993, Nakayama, et al., 1999). Consistent with this interpretation is that several other members of the φCTX phage family lack the ctx gene (Nakayama, et al., 1999). Likewise, in PAGI-6 the car gene is replaced by 1589 bp fragment of DNA that does not contain an apparent ORF and shares no similarity with the ctx gene. This fragment does, however, contain two pseudogenes that are similar to ORFs in a prophage-related genomic island from Pseudomonas syringae pathovar (pv). phaseolicola. This 1589 bp sequence has a G+C content of 46.7%, significantly lower than the 60.6% G+C content of PAGI-6 (FIG. 9), suggesting its origin is also distinct from that of the rest of the island.

[0170] On the other end of PAGI-6, the φCTX integrase gene (int) has been replaced by a 2,768 bp piece of DNA containing multiple ORFs (FIGS. 9 and 10). This DNA fragment contains a putative recombinase gene (6PG42) that is 70% identical to a phage-associated integrase gene (PSPPH_{—}4973) found in the P. syringae prophage PSPPH06. The PAGI-6 recombinase gene is flanked on one side by two ORFs (6PG43 and 6PG44) that share 50% identity to putative bacteriophage protein-encoding genes from Salmonella enterica. The function of the first is unclear, but the second is predicted to encode a protein with homology to the prophage maintenance system killer protein Doc. Doc has been described in the P1 bacteriophage of Escherichia coli and helps in phage maintenance by causing lethality in cells that have been cured of the phage (Lehnherr, et al., 1993). These ORFs are followed by a 46 bp duplication of the 3′ end of the tRNA^{Thr} gene, which likely represents the duplication of the attachment site that occurred during integration (attR). Instead of marking the end of the island, however, the attR site is followed by an additional 7,403 bp of DNA that contains two additional predicted integrase genes (6PG45 and 6PG46) and a stretch of DNA devoid of ORFs with the exception of one small 99 bp sequence (6PG47). A 3700 bp stretch of DNA carrying the two integrase genes is 90% similar to DNA blocks found in strains 2192 and PACS2. This flanking segment of DNA may represent the remnants of a second genetic element. Composite genomic islands can be formed when a second mobile element integrates into an attL or attR site of an already integrated distinct genomic element (Qiu, et al., 2006). Despite the absence of an additional attR site at the very end of the island, the presence of integrase ORFs beyond the attR site, as well as the differing G+C content of the regions before and after the attR site (62.5% versus 51.3%) supports this composite element hypothesis.

[0171] PAGI-7. The next largest identified island was PAGI-7 (Fleiszig et al. (1997)). This island is 22 479 bp in size and has a G+C content of 55.8%. PAGI-7 is not found within a tRNA gene, but instead is integrated within PAO1 ORF PA3961, which is predicted to encode HprB, a probable ATP-dependent helicase that is also not a previously identified RGP. Although the island interrupts PA3961, no portion of this ORF is deleted or repeated. PAGI-7 contains 20 ORFs (FIG. 11, Table 7), including multiple mobility-associated ORFs, predicted transcriptional regulators, and a predicted ptxABCDE operon. The latter was first identified in Pseudomonas stutzeri, where it is required for the oxidation of phosphite to phosphate (Metcalf & Wolfe, 1998; Costas et al., 2001).

[0172] PAGI-7 contains 20 total ORFs (FIG. 11, Table 7). One ORF (7PG4) shares 87% identity with an RtrR transcriptional regulator found in the fox genomic island from Pseudomonas syringae pv. actinidiae, a pathogenicity island that encodes a toxin causing chlorosis (discoloration due to lack of chlorophyll) in plants by inhibiting an enzyme in the urea cycle (Mitchell & Bieleski, 1977, Genka, et al., 2006). Seven ORFs (7PG2, 5, 7, 8, 18-20) are either not similar to characterized genes or have similarity only to ORFs encoding hypothetical proteins from Pseudomonas aeruginosa, Shewenella aquaeolei or Caulobacter crescentus. One of the C. crescentus similar ORFs (7PG19) contains two adenyl-guanylyl cyclase domains (75% and 85% alignment) (Liu, et al., 1997) and the other ORF (7PG20) has 90% alignment to the effector domain of the CAP family of transcription factors (McKay & Steitz, 1981), of which cAMP receptor protein is a member. Thus these genes may encode proteins involved cAMP signaling.

[0173] PAGI-7 also carries a region (7PG11-15) that shares 99% nucleotide identity to the ptxABCDE operon found in Pseudomonas stutzeri. In P. stutzeri, this operon is required for the oxidation of phosphite to phosphate, with ptxA, B, and C predicted to encode components of a phosphite transporter, ptxD a phosphite dehydrogenase, and ptxE a transcriptional regulator (Metcalf & Wolfe, 1998, Costas, et al., 2001). Expression of the P. stutzeri operon is upregulated under phosphate starvation conditions, suggesting that it could potentially provide an alternate route of phosphorous acquisition by oxidizing phosphite to phosphate, but its actual role in nature is less clear since the environment contains very little phosphite (White & Metcalf, 2004). A 4660 bp DNA segment 98% similar to the PAGI-7 pix operon is also found in strain 2192, but at the 3′ end of a 63 kbp genomic island located next to the PA2729 homolog, or RGP28 (Mathee, et al., 2008). The PAGI-7 ptx operon is flanked by inverted repeats that carry duplicated ORFs encoding putative IS5-related transposases (7PG10 and 7PG16). In addition, it has a G+C content of 61.4%, higher than the overall 55.8% G+C content of PAGI-7, suggesting that this region has an origin distinct from that of the rest of the island.

[0174] The seven remaining ORFs of PAGI-7 are similar to genes associated with mobile elements, including genes encoding recombinases (7PG1 and 7PG3), a type III restriction enzyme (7PG6), a putative transposase similar to an ORF found in IS66-related insertion sequences (7PG9), and a reverse transcriptase (7PG17). A 2063 bp region of DNA that spans most of 7PG4-6 is 90% similar to a block of DNA found in strain PA7. The ORF encoding the predicted reverse transcriptase homolog is located within a 1.8 kb region that is similar to a group II intron found on a megaplasmid from Ralstonia eutropha (Schwartz, et al., 2003). Group II introns are RNA retro-elements that are often associated with mobile DNA elements in bacteria (Dai & Zimmerly, 2002). The two recombinase ORFs (7PG1 and 7PG3) are located at the beginning of the island and are 80% and 76% identical to site-specific recombinase genes from Pseudomonas stutzeri A1501 (PST0585 and PST0587, respectively) (Yan, et al., 2008), and are also similar to two recombinase genes in P. syringae pv. tomato (PSPTO4742 and 4744). The PAGI-7 recombinases are adjacent to the tox pathogenicity island RtrR regulator homolog (7PG4), yet neither P. stutzeri nor P. syringae pv. tomato contain the tox pathogenicity island. However, both the PAGI-7 recombinase ORFs and those of P. stutzeri and P. syringae are contained in islands that have integrated into hrpB genes (P. aeruginosa PA3961, P. stutzeri A 1501. PST0583, and P. syringae pv. tomato PSPTO4745, respectively). This suggests that these recombinases may mediate integration into a conserved site in or near hprB genes. Although less common than integration into tRNA genes, insertion into non-tRNA genes has been observed with other P. aeruginosa islands, such as PAGI-1 (Liang, et al., 2001). Thus PAGI-7 appears to be a large mobile element that acquired the pix operon as well as a group II intron.

[0175] PAGI-8. The next largest identified island was PAGI-8 (FIG. 12). This island, which is 16 195 bp in size and has a G+C content of 54.1%, is inserted into the genome immediately flanking a tRNA^{Phe} gene (PA5149.1) at a site designated as RGP60 by Mathee et al. (2008). A 44 bp duplication of the tRNA gene (representing an attR site) is at the end of the island. PA5149.1 is located between PA5149 and PA5150, which encode a hypothetical protein and a probable short-chain dehydrogenase, respectively. PAGI-8 contains 12 ORFs, including one predicted to encode a protein with 69% identity and 78% similarity to the TraY/DotA-like type IV secretion system protein of Cupriavidus metallidurans strain CH34 (formerly Ralstonia metallidurans), and 19% and 21% identities and 32% and 37% similarities to DotA of Legionella pneumophila and TraY of Escherichia coli, respectively. Also in PAGI-8 are ORFs similar to an ATPase and a zinc-binding transcriptional regulator, but no additional ORFs with similarity to other type IV secretion system genes.

[0176] PAGI-8 contains 12 ORFs, several of which may encode proteins with interesting functions (FIG. 12, Table 8). ORF 8PG8 is predicted to encode a protein with 68% identity and 78% similarity to the TraY/DotA-like type IV secretion system protein of Cupriavidus metallidurans strain CH34 (formerly Ralstonia metallidurans), and 19% and 21% identity and 32% and 37% similarity to DotA of Legionella pneumophila and TraY of E. coli, respectively. DotA is an integral cytoplasmic membrane protein thought to comprise part of the Dot/Icm type IV secretion apparatus, although it reportedly is secreted into culture supernatants by the same transport system (Roy & Isberg, 1997, Nagai & Roy, 200.1). Like DotA, the putative protein encoded by 8PG8 is predicted to contain eight membrane-spanning regions, suggesting that it is a transmembrane protein. Type IV secretion systems often play important roles in the propagation of genomic islands (Juhas, et al., 2007), although none of the other ORFs in PAGI-8 are similar to known type IV secretion system genes, so the function of this putative TraY/DotA-like protein in P. aeruginosa is unclear. A second ORF in the island, 8PG5, is predicted to encode a zinc-binding transcriptional regulator with a helix-turn-helix DNA binding motif and a zinc peptidase domain. This predicted transcriptional regulator and its flanking hypothetical ORF (8PG4) are similar to two adjacent ORFs in Photobacterium profundum. Another PAGI-8 ORF, 8PG2, has 22% identity to an ORF predicted to encode a member of the AAA+ superfamily of adenosine triphosphatases (ATPases), and contains a nucleotide binding Walker A motif (Walker, et al., 1982). AAA+ ATPases provide energy for many cellular processes, including some bacterial secretion systems (Akeda & Galan, 2005). Another ORF, 8PG12, has a low level of similarity (15% identity and 20% similarity) to a pentapeptide repeat protein. The function of these proteins is unknown, but they are defined by tandem repeats of a five amino acid motif (Vetting, et al., 2006), yet 8PG12 has only a single 5 amino acid sequence that matches this motif. Four other ORFs in this island (8PG3, 8PG4, 8PG6, 8PG9) are not similar to known genes. PAGI-8 contains 4 ORFs associated with mobile elements: two ORFs related to the transposon IS407 (8PG10 and 8PG11), an ORF predicted to encode a phage integrase (8PG7), and an ORF predicted to encode a site-specific recombinase (8PG 1). Interestingly, the transposon-related genes are 99% identical to the IS407 transposase ORFs PA0986 and PA0987 found in several other Pseudomonas aeruginosa strains, including PAO1 (the 8.9 kb tRNA^{Lys} associated genomic island), C3719, PA14, and PA7 (Stover, et al., 2000). These genes are also found in PAGI-5 of PSE9 and in the ExoU genomic islands (Kulasekara, et al., 2006, Battle, et al., 2008).

[0177] PAGI-9 and PAGI-10. The PAGI-9 island is 6581 bp in size and is located in an intergenic region between PA3835 and PA3836, both of which encode hypothetical proteins (FIG. 13A). This region was not identified as an RGP by Mathee et al. (2008). It has a G+C content of 63.4%. This island consists of a single very large ORF of 6672 bp that is similar to the rearrangement hot spot (Rhs) family of genetic elements (FIG. 13A and Table 9) (Hill, 1999). PAGI-10 is 2194 bp in size and has a G+C content of 56.6%. It is located in RGP25 between PA2457 and PA2462 of PAO1, which encode a hypothetical protein with partial similarity to an Rhs core protein and an extremely large hypothetical protein (5628 amino acids) with a low level of similarity to hemagglutinin, respectively (FIG. 13B). PAGI-10 replaces the PAO1 ORFs PA2458-61. PA2458 has partial similarity to an Rhs element, and PA2459-61 do not have similarity to known genes. Similar to PAGI-9, PAGI-10 contains a single 2457-bp ORF with similarity to an Rhs core ORF.

[0178] Both PAGI-9 and PAGI-10 are similar to Rhs elements. These intriguing elements were first characterized in E. coli but were subsequently found in a number of Gram-negative bacteria, including Salmonella, Yersinia, Actinobacillus, Burkholderia, Vibrio, as well as Pseudomonas aeruginosa (Hill, 1999, Mena & Chen, 2007). Their presence and number vary from strain to strain; whereas E. coli strain K-12 contains five Rhs elements that constitute 0.8% of its entire genome (Hill, et al., 1994), other E. coli strains do not harbor any of these elements (Hill, et al., 1995). Their function is unknown, although it has been speculated that they encode proteins that are secreted or associated with the cell wall and that bind to ligands (Hill, et al., 1994). In any case, the maintenance of such large ORFs indicates that Rhs elements are under strong positive selection (Petersen, et al., 2007). Rhs elements vary in structure but typically consist of several of the following components (Hill, 1999): (i) A large Rhs core ORF comprised of a conserved Rhs core followed by a shorter highly variable core extension region (Feulner, et al., 1990). Interestingly although they form a single ORF, the cure and core extension often differ significantly in G+C content, suggesting that the Rhs core ORF is a composite element. A conspicuous feature of the predicted core protein is a repeated peptide motif consisting of YDxxGRL(I/T) (Hill, et al., 1994). (ii) A small downstream ORF that appears to encode a protein with a signal peptide. (iii) A downstream insertion sequence. (iv) An upstream gene encoding a Val-Gly dipeptide repetition (Vgr) protein. Vgr proteins have attracted much interest recently because they have been shown to be virulence determinants associated with novel type VI secretion systems in P. aeruginosa and V. cholerae (Wilderman, et al., 2001, Sheahan, et al., 2004, Mougous, et al., 2006). In the latter bacterium, Vgr proteins are secreted and cause intoxication of mammalian cells upon cell contact (Wildermian, et al., 2001). (v) A gene encoding a hemolysin co-regulated protein (Hcp) (Wang, et al., 1998). Secretion of Hcp by a type VI secretion system has been demonstrated in V. cholerae (Wilderrnan, et al., 2001) and P. aeruginosa (Mougous, et al., 2006).

[0179] The PAGI-9 Rhs element does not contain ORFs predicted to encode Vgr or Hcp proteins or an associated insertion sequence. However, its Rhs core ORF does manifest a marked discrepancy in G+C content between the Rhs core itself (64.9%) and the core extension (45.2%) (FIG. 13A). The putative protein encoded by the PAGI-9 Rhs core ORF is nearly identical over the first 2000 amino acids to an Rhs homolog found in P. aeruginosa strain 2192 (PA2G_{—}03278) (Mathee, et al., 2008). However the core extensions of these two ORFs are unrelated. PA14 carries a truncated homolog (the N-terminal 159 amino acids) of this ORF in the same genomic location, followed by 1565 bp of noncoding sequence (Lee, et al., 2006), while PAO1 has 2645 bp of noncoding DNA between PA3835 and PA3836 (Stover, et al., 2000).

[0180] Similar to PAGI-9, PAGI-10 contains a single ORF with similarity to an Rhs core ORF. However, whereas the PAGI-9 Rhs core ORF is 6,672 bp, the PAGI-10 ORF is only 2,457 bp. Furthermore, PAGI-10 contains only the 3′portion of this ORF; the 5′ portion is encoded by PAO1 conserved sequence (FIG. 13B). Thus the PAGI-10 genomic insertion extends an ORF already present in the PAO1 genome. PA14 carries two ORFs (PA14 20520 and 32830) that are 97% and 98% identical, respectively, to the PAGI-10 associated ORF over their entire lengths except for the core extensions (Lee, et al., 2006). PA14 32830 is located in the same genomic locus as PAGI-10. Similar ORFs are also found in the recently sequenced strains PACS2, 2192, and C3719 at the same locus; thus PAGI-10 may constitute a locus of the relatively conserved P. aeruginosa genomic backbone that was deleted from PAO1. Over the N-terminal predicted 750 amino acids, the PAGI-10 Rhs core ORF protein is very similar to multiple Rhs-like putative proteins encoded by other P. aeruginosa strains, but the C-terminal region does not share similarity with any of these, suggesting that this ORF encodes a conserved Rhs core protein with a novel core extension. Consistent with this interpretation is the difference in G+C content between the core (64.9%) and the core extension (49.7%) (FIG. 13B). No Vgr- or Hcp-encoding genes or insertion sequences are associated with PAGI-10.

[0181] PAGI-11. PAGI-11 is the smallest of the identified genomic islands, consisting of 2003 bp (FIG. 13C). As such, it verifies the power of the subtractive hybridization approach to detect genetic elements as small as 2 kb. PAGI-11 has a G+C content of 50.5% and does not contain any ORFs or repeated sequences. It is located in RGP52 between PA1934 and PA1940 of the PAO1 genome, which encode hypothetical proteins, although a region of PA1940 is similar to a catalase domain. PAGI-11 replaces a 5870-bp segment of the PAO1 genome containing PA1935-1939. PA1935 and PA1936 are predicted to encode proteins of unknown function, and PA1939 is similar to a gene encoding an ATP-dependant endonuclease. PA1937 and PA1938 are similar to two different IS911 ORFs predicted to encode transposases, and are almost completely identical to PA0979 and PA0978, which are part of the 8.9 kb tRNA^{Lys}-associated genomic island of strain PAO1. In addition to PAO1, unique genomic insertions containing between one and five ORFs are found at this locus in strains PA14, PACS2, 2192, and C3719 (Mathee et al., 2008). Thus, it appears that these strains contain mobile genetic elements at the locus where PAGI-11 resides in PSE9.

[0182] Distribution of genomic islands in clinical isolates. To determine the frequency and distribution of PAGI-6, -7, -8, -9, and -10 in P. aeruginosa strains, a collection of 35 clinical isolates was screened for sequences found within these genomic islands (Table 5). PCR was used to amplify a sequence from each island in each isolate (Table 11). PAGI-6 was found in two (6%) of the 35 isolates. PAGI-7 and PAGI-9 were both present in the same 16 (46%) isolates. PAGI-8 was found only in strain PSE9 (3%). PAGI-10 was found in 20 (57%) of strains, and with the exception of PSE9, was only present in strains that lacked PAGI-7 and PAGI-9.

### CONCLUSION

[0183] In conclusion, the information presented here, along with that previously reported (Battle et al., 2008), demonstrates the utility of targeting a hypervirulent strain of P. aeruginosa as a source of genetic information found in the accessory genome. Applying this approach to a panel of clinical isolates has led to the identification of seven novel genomic islands varying in size from 99 to 2 kb and together containing 201 ORFs. Several are related to known pathogenicity islands, phages, or Rhs elements while others are quite novel. Many of these islands appear to be chimeric in nature, further demonstrating that composite genomic islands occur commonly in the evolution of P. aeruginosa. While three of the seven islands are located in or adjacent to tRNA genes, the remaining four are not, indicating that alternative sites are also capable of being targeted for integration in P. aeruginosa. Together, these results shed additional light on die evolution of genomic islands in P. aeruginosa and attest to the vast amount of genetic information carried by these elements.

### REFERENCES

[0184] Akeda Y & Galan J E (2005) Chaperone release and unfolding of substrates in type III secretion. Nature 437: 911-915.
[0185] Alibaud, L., T. Kohler, A. Coudray, C. Prigent-Combaret, E. Bergeret, J. Perrin, M. Benghezal, C. Reimmann, Y. Gauthier, C. van Delden, I. Attree, M. O. Fauvarque, and P. Cosson. 2008. Pseudomonas aeruginosa virulence genes identified in a Dictyostelium host model. Cell. Microbiol. 10:729-740.
[0186] Altschul, S. F., W. Gish, W. Miller, E. W. Myers, and D. J. Lipman. 1990. Basic local alignment search tool. J. Mol. Biol. 215:403-410.
[0187] Battle S E, Meyer F, Rello J, Kung V L & Hauser A R (2008) The hybrid pathogenicity island PAGI-5 contributes to the highly virulent phenotype of a Pseudomonas aeruginosa isolate in mammals. J Bacteriol 190: 7130-7140.
[0188] Cheetham, B. F., and M. E. Katz. 1995. A role for bacteriophages in the evolution and transfer of bacterial virulence determinants. Mol. Microbiol. 18:201-208.
[0189] Comolli, J. C., A. R. Hauser, L. Waite, C. B. Whitchurch, J. S. Mattick, and J. N. Engel. 1999. Pseudomonas aeruginosa gene products PilT and PiIU are required for cytotoxicity in vitro and virulence in a mouse model of acute pneumonia. Infect. Immun. 67:3625-3630.
[0190] Costas A M, White A K & Metcalf W W (2001) Purification and characterization of a novel phosphorus-oxidizing enzyme from Pseudomonas stutzeri WM88. J Biol Chem 276: 17429-17436.
[0191] Cserzo M, Wallin E, Simon I, von Heijne G & Elofsson A (1997) Prediction of transmembrane alpha-helices in prokaryotic membrane proteins: the dense alignment surface method. Protein Eng 10: 673-676.
[0192] Dai L & Zimmerly S (2002) The dispersal of five group II introns among natural populations of Escherichia coli. Rna 8: 1294-1307.
[0193] Dobrindt, U., B. Hochhut, U. Hentschel, and J. Hacker. 2004. Genomic islands in pathogenic and environmental microorganisms. Nat. Rev. Microbiol. 2:414-424.
[0194] Dong, X., M. Mindrinos, K. R. Davis, and F. M. Ausubel. 1991. Induction of Arabidopsis defense genes by virulent and avirulent Pseudomonas syringae strains and by a cloned avirulence gene. Plant Cell 3:61-72.
[0195] Elrod R & Braun A (1942) Pseudomonas aeruginosa: its role as a plant pathogen. J Bacteriol 44: 633-645.
[0196] Feltman, H., G. Schulert, S. Khan, M. Jain, L. Peterson, and A. R. Hauser. 2001. Prevalence of type III secretion genes in clinical and environmental isolates of Pseudomonas aeruginosa. Microbiology 147:2659-2669.
[0197] Feulner G, Gray J A, Kirschman J A, et al. (1990) Structure of the rhsA locus from Escherichia coli K-12 and comparison of rhsA with other members of the rhs multigene family. J Bacteriol 172: 446-456.
[0198] Finck-Barbancon, V., J. Goranson, L. Zhu, T. Sawa, J. P. Wiener-Kronish, S. M. J. Fleiszig, C. Wu, L. Mende-Mueller, and D. Frank. 1997. ExoU expression by Pseudomonas aeruginosa correlates with acute cytotoxicity and epithelial injury. Mol. Microbiol. 25:547-557.
[0199] Finlay B B & Falkow S (1997) Common themes in microbial pathogenicity revisited. Microbiol. Mol Biol R 61: 136-169.
[0200] Fitzsimmons, S. C. 1993. The changing epidemiology of cystic fibrosis. J. Pediatr. 122:1-9.
[0201] Fleiszig, S. M. J., J. P. Wiener-Kronish, H. Miyazaki, V. Vallas, K. Mostov, D. Kanada, T. Sawa, T. S. B. Yen, and D. Frank. 1997. Pseudomonas aeruginosa-mediated cytotoxicity and invasion correlate with distinct genotypes at the loci encoding exoenzyme S. Infect. Immun. 65:579-586.
[0202] Fogh, R. H., G. Ottleben, H. Ruterjans, M. Schnarr, R. Boelens, and R. Kaptein. 1994. Solution structure of the LexA repressor DNA binding domain determined by 1H NMR spectroscopy. EMBO J. 13:3936-3944.
[0203] Gaillard, C., and F. Strauss. 1990. Ethanol precipitation of DNA with linear polyacrylamide as carrier. Nucleic Acids Res. 18:378.
[0204] Garriga, X., S. Calero, and J. Barbe. 1992. Nucleotide sequence analysis and comparison of the lexA genes from Salmonella typhimurium, Erwinia carotovora, Pseudomonas aeruginosa and Pseudomonas putida. Mol. Gen. Genet. 236:125-134.
[0205] Genka H, Baba T, Tsuda M, et al. (2006) Comparative analysis of argK-tox clusters and their flanking regions in phaseolotoxin-producing Pseudomonas syringae pathovars. J Mol Evol 63: 401-414.
[0206] Glazebrook, J. S., R. S. Campbell, G. W. Hutchinson, and N. D. Stallman. 1978. Rodent zoonoses in North Queensland: the occurrence and distribution of zoonotic infections in North Queensland rodents. Aust. J. Exp. Biol. Med. Sci. 56:147-156.
[0207] Green, S. K., M. N. Schroth, J. J. Cho, S. K. Kominos, and V. B. Vitanza-jack. 1974. Agricultural plants and soil as a reservoir for Pseudomonas aeruginosa. Appl. Microbiol. 28:987-991.
[0208] Hammer A S, Pedersen K, Andersen T H, Jorgensen J C & Dietz H H (2003) Comparison of Pseudomonas aeruginosa isolates from mink by serotyping and pulsed-field gel electrophoresis. Vet Microbiol 94: 237-243.
[0209] Hauser, A. R., E. Cobb, M. Bodi, D. Mariscal, J. Vallés, J. N. Engel, and J. Rello. 2002. Type III protein secretion is associated with poor clinical outcomes in patients with ventilator-associated pneumonia caused by Pseudomonas aeruginosa. Crit. Care Med. 30:521-528.
[0210] Hauser, A. R., P. J. Kang, and J. Engel. 1998. PepA, a novel secreted protein of Pseudomonas aeruginosa, is necessary for cytotoxicity and virulence. Mol. Microbiol. 27:807-818.
[0211] Hayashi, T., T. Baba, H. Matsumoto, and Y. Terawaki. 1990. Phage-conversion of cytotoxin production in Pseudomonas aeruginosa. Mol. Microbiol. 4:1703-1709.
[0212] Hayashi T, Matsumoto H, Ohnishi M & Terawaki Y (1993) Molecular analysis of a cytotoxin-converting phage, phi CTX, of Pseudomonas aeruginosa: structure of the attP-cos-ctx region and integration into the serine tRNA gene. Mol Microbiol 7: 657-667.
[0213] Hayashi T, Matsumoto H, Olnishi M, Yokota S, Shinomiya T, Kageyama M & Terawaki Y (1994) Cytotoxin-converting phages, phi CTX and PS21, are R pyocin-related phages. FEMS Microbiol Lett 122: 239-244.
[0214] He, J., R. L. Baldini, E. Deziel, M. Saucier, Q. Zhang, N. T. Liberati, D. Lee, J. Urbach, H. M. Goodman, and L. G. Rahme. 2004. The broad host range pathogen Pseudomonas aeruginosa strain PA14 carries two pathogenicity islands harboring plant and animal virulence genes. Proc. Natl. Acad. Sci. USA 101:2530-2535.
[0215] Hill C W (1999) Large genomic sequence repetitions in bacteria: lessons from rRNA operons and Rhs elements. Res Microbiol 150: 665674.
[0216] Hill C W, Sandt C H & Vlazny D A (1994) Rhs elements of Escherichia coli: a family of genetic composites each encoding a large mosaic protein. Mol. Microbiol. 12: 865-871.
[0217] Hill C W, Feulner G, Brody M S, Zhao S, Sadosky A B & Sandt C H (1995) Correlation of Rhs elements with Escherichia coli population structure. Genetics 141: 15-24.
[0218] Hoadley, A. W. 1977. Pseudomonas aeruginosa in surface waters, p. 31-57. In V. M. Young (ed.), Pseudomonas aeruginosa: ecological aspects and patient colonization. Raven Press, New York, N.Y.
[0219] Hoang, T. T., A. J. Kutchma, A. Becher, and H. P. Schweizer. 2000. Integration-proficient plasmids for Pseudomonas aeruginosa: site-specific integration and use for engineering of reporter and expression strains. Plasmid 43:59-72.
[0220] Hogan, D. A., and R. Kolter. 2002. Pseudomonas-Candida interactions: an ecological role for virulence factors. Science 296:2229-2232.
[0221] Holloway, B. W., V. Krishnapillai, and A. F. Morgan. 1979. Chromosomal genetics of Pseudomonas. Microbiol. Rev. 43:73-102.
[0222] Jander, G., L. G. Rahme, and F. M. Ausubel. 2000. Positive correlation between virulence of Pseudomonas aeruginosa mutants in mice and insects. J. Bacteriol. 182:3843-3845.
[0223] Juhas M, Crook D W, Dimopoulou I D, Lunter G, Harding R M, Ferguson D J & Hood D W (2007) Novel type IV secretion system involved in propagation of genomic islands. J. Bacteriol. 189: 761-771.
[0224] Kholodii, G. Y., O. V. Yurieva, Z. Gorlenko, S. Z. Mindlin, I. A. Bass, O. L. Lomovskaya, A. V. Kopteva, and V. G. Nikiforov. 1997. Tn5041: a chimeric mercury resistance transposon closely related to the toluene degradative transposon Tn4651. Microbiology 143:2549-2556.
[0225] Kiewitz, C., K. Larbig, J. Klockgether, C. Weinel, and B. Tummler. 2000. Monitoring genome evolution ex vivo: reversible chromosomal integration of a 106 kb plasmid at two tRNALys gene loci in sequential Pseudomonas aeruginosa airway isolates. Microbiology 146:2365-2373.
[0226] Klockgether, J., O. Reva, K. Larbig, and B. Tummler. 2004. Sequence analysis of the mobile genome island pKLC102 of Pseudomonas aeruginosa C. J. Bacteriol. 186:518-534.
[0227] Klockgether, J., D. Wurdemann 0. Reva, L. Wiehlmann, and B. Tummler. 2007. Diversity of the abundant pKLC102/PAGI-2 family of genomic islands in Pseudomonas aeruginosa. J. Bacteriol. 189:2443-2459.
[0228] Kulasekara, B. R., H. D. Kulasekara, M. C. Wolfgang, L. Stevens, D. W. Frank, and S. Lory. 2006. Acquisition and evolution of the exoU locus in Pseudomonas aeruginosa. J. Bacteriol. 188:40374050.
[0229] Larbig, K. D., A. Christmann, A. Johann, J. Klockgether, T. Hartsch, R. Merkl, L. Wiehimann, H. J. Fritz, and B. Tummler. 2002. Gene islands integrated into tRNAGly genes confer genome diversity on a Pseudomonas aeruginosa clone. J. Bacteriol. 184:6665-6680.
[0230] Lawrence, J. G. 2005. Horizontal and vertical gene transfer: the life history of pathogens. Contrib. Microbiol. 12:255-271.
[0231] Lee, D. G., J. M. Urbach, G. Wu, N. T. Liberati, R. L. Feinbaum, S. Miyata, L. T. Diggins, J. He, M. Saucier, E. Deziel, L. Friedman, L. Li, G. Grills, K. Montgomery, R. Kucherlapati, L. G. Rahme, and F. M. Ausubel. 2006. Genomic analysis reveals that Pseudomonas aeruginosa virulence is combinatorial. Genome Biol. 7:R90.
[0232] Lehnherr H, Maguin E, Jafri S & Yarmolinsky M B (1993) Plasmid addiction genes of bacteriophage P1: doc, which causes cell death on curing of prophage, and phd, which prevents host death when prophage is retained. J Mol Biol 233: 414-428.
[0233] Liang, X., X. Q. Pham, M. V. Olson, and S. Lory. 2001. Identification of a genomic island present in the majority of pathogenic isolates of Pseudomonas aeruginosa. J. Bacteriol. 183:843-853.
[0234] Liu S, Yahr T L, Frank D W & Barbieri J T (1997) Biochemical relationships between the 53-kilodalton (Exo53) and 49-kilodalton (ExoS) forms of exoenzyme S of Pseudomonas aeruginosa. J. Bacteriol. 179: 1609-1613.
[0235] Logsdon, L. K., and J. Mecsas. 2003. Requirement of the Yersinia pseudotuberculosis effectors YopH and YopE in colonization and persistence in intestinal and lymph tissues. Infect. Immun. 71:4595-4607.
[0236] Lukashin, A. V., and M. Borodovsky. 1998. GeneMark.hmm: new solutions for gene finding. Nucleic Acids Res. 26:1107-1115.
[0237] Mahajan-Miklos, S., M.-W. Tan, L. G. Rahme, and F. M. Ausubel. 1999. Molecular mechanisms of bacterial virulence elucidated using a Pseudomonas aeruginosa-Caenorhabditis elegans pathogenesis model. Cell 96:47-56.
[0238] Mathee K, Narasimhan G, Valdes C et al. (2008) Dynamics of Pseudomonas aeruginosa genome evolution. P Natl Acad Sci USA 105: 3100-3105.
[0239] McKay D B & Steitz T A (1981) Structure of catabolite gene activator protein at 2.9 A resolution suggests binding to left-handed B-DNA. Nature 290: 744-749.
[0240] Mena J & Chen C (2007) Identification of strain-specific DNA of Actinobacillus actinomycetemcomitans by representational difference analysis. Oral Microbiol. Immunol. 22: 429-432.
[0241] Metcalf W W & Wolfe R S (1998) Molecular genetic analysis of phosphite and hypophosphite oxidation by Pseudomonas stutzeri WM88. J Bacteriol 180: 5547-5558.
[0242] Meyer, F., A. Goesmann, A. C. McHardy, D. Bartels, T. Bekel, J. Clausen, J. Kalinowski, B. Linke, O. Rupp, R. Giegerich, and A. Puhler. 2003. GenDB—an open source genome annotation system for prokaryote genomes. Nucleic Acids Res. 31:2187-2195.
[0243] Mitchell R E & Bieleski R L (1977) Involvement of Phaseolotoxin in Halo Blight of Beans: Transport and Conversion to Functional Toxin. Plant Physiol 60: 723-729.
[0244] Mougous J D, Cuff M E, Raunser S, et al. (2006) A virulence locus of Pseudomonas aeruginosa encodes a protein secretion apparatus. Science 312: 1526-1530.
[0245] Nagai H & Roy C R (2001) The DotA protein from Legionella pneumophila is secreted by a novel process that requires the Dot/Icm transporter. Embo J 20: 5962-5970.
[0246] Nakayama, K., S. Kanaya, M. Ohnishi, Y. Terawaki, and T. Hayashi. 1999. The complete nucleotide sequence of phi CTX, a cytotoxin-converting phage of Pseudomonas aeruginosa: implications for phage evolution and horizontal gene transfer via bacteriophages. Mol. Microbiol. 31:399-419.
[0247] Nakayama K, Takashima K, Ishihara H et al. (2000) The R-type pyocin of Pseudomonas aeruginosa is related to P2 phage, and the F-type is related to lambda phage. Mol Microbiol 38: 213-231.
[0248] Nicas, T. I., and B. H. Iglewski. 1984. Isolation and characterization of transposon-induced mutants of Pseudomonas aeruginosa deficient in production of exoenzyme S. Infect. Immun. 45:470-474.
[0249] Petersen L, Bollback J P, Dimmic M, Hubisz M & Nielsen R (2007) Genes under positive selection in Escherichia coli. Genome Res. 17: 1336-1343.
[0250] Qiu, X., A. U. Gurkar, and S. Lory. 2006. Interstrain transfer of the large pathogenicity island (PAPI-1) of Pseudomonas aeruginosa. Proc. Natl. Acad. Sci. USA 103:19830-19835.
[0251] Rahme, L. G., F. M. Ausubel, H. Cao, E. Drenkard, B. C. Goumnerov, G. W. Lau, S. Mahajan-Miklos, J. Plotnikova, M. W. Tan, J. Tsongalis, C. L. Walendziewicz, and R. G. Tompkins. 2000. Plants and animals share functionally common bacterial virulence factors. Proc. Natl. Acad. Sci. USA 97:8815-8821.
[0252] Rahme, L. G., E. J. Stevens, S. F. Wolfort, J. Shao, R. G. Tompkins, and F. M. Ausubel. 1995. Common virulence factors for bacterial pathogenicity in plants and animals. Science 268:1899-1902.
[0253] Rahme, L. G., M. W. Tan, L. Le, S. M. Wong, R. G. Tompkins, S. B. Calderwood, and F. M. Ausubel. 1997. Use of model plant hosts to identify Pseudomonas aeruginosa virulence factors. Proc. Natl. Acad. Sci. USA 94:13245-13250.
[0254] Ramos, J. L., M. Mailinez-Bueno, A. J. Molina-Henares, W. Teran, K. Watanabe, X. Zhang, M. T. Gallegos, R. Brennan, and R. Tobes. 2005. The TetR family of transcriptional repressors. Microbiol. Mol. Biol. Rev. 69:326-356.
[0255] Raymond, C. K., E. H. Sims, A. Kas, D. H. Spencer, T. V. Kutyavin, R. G. Ivey, Y. Zhou, R. Kaul, J. B. Clendenning, and M. V. Olson. 2002. Genetic variation at the O-antigen biosynthetic locus in Pseudomonas aeruginosa. J. Bacteriol. 184:3614-3622.
[0256] Reiter, W. D., P. Palm, and S. Yeats. 1989. Transfer RNA genes frequently serve as integration sites for prokaryotic genetic elements. Nucleic Acids Res. 17:1907-1914.
[0257] Rhame, F. S. 1979. The ecology and epidemiology of Pseudomonas aeruginosa, p. 31-51. In L. D. Sabath (ed.), Pseudomonas aeruginosa: the organism, diseases it causes, and their treatment. Hans Huber Publishers, Bern, Switzerland.
[0258] Riley M A & Wertz J E (2002) Bacteriocins: evolution, ecology, and application. Annu Rev Microbiol 56: 117-137.
[0259] Roy C R & Isberg R R (1997) Topology of Legionella pneumophila DotA: an inner membrane protein required for replication in macrophages. Infect Immun 65: 571-578.
[0260] Roy-Burman, A., R. H. Savel, S. Racine, B. L. Swanson, N. S. Revadigar, J. Fujimoto, T. Sawa, D. W. Frank, and J. P. Wiener-Kronish. 2001. Type III protein secretion is associated with death in lower respiratory and systemic Pseudomonas aeruginosa infections. J. Infect. Dis. 183:1767-1.774.
[0261] Sambrook, J., E. F. Fritsch, and T. Maniatis. 1989. Molecular cloning: a laboratory manual, 2nd ed. Cold Spring Harbor Laboratory Press, Cold Spring Harbor, N.Y.
[0262] Sastry, P. A., B. B. Finlay, B. L. Pasloske, W. Paranchych, J. R. Pearlstone, and L. B. Smillie. 1985. Comparative studies of the amino acid and nucleotide sequences of pilin derived from Pseudomonas aeruginosa PAK and PAO. J. Bacteriol. 164:571-577.
[0263] Schmidt K D, Tummler B & Romling U (1996) Comparative genome mapping of Pseudomonas aeruginosa PAO with P. aeruginosa C, which belongs to a major clone in cystic fibrosis patients and aquatic habitats. J Bacteriol 178: 85-93.
[0264] Schulert, G. S., H. Feltman, S. D. P. Rabin, C. G. Martin, S. E. Battle, J. Rello, and A. R. Hauser. 2003. Secretion of the toxin ExoU is a marker for highly virulent Pseudomonas aeruginosa isolates obtained from patients with hospital-acquired pneumonia. J. Infect. Dis. 188:1695-1706.
[0265] Schwartz E, Henie A, Cramm R, Eitinger T, Friedrich B & Gottschalk G (2003) Complete nucleotide sequence of pHG1: a Ralstonia eutropha H16 megaplasmid encoding key enzymes of H(2)-based ithoautotrophy and anaerobiosis. J Mol Biol 332: 369-383.
[0266] Schweizer, H. P., and T. T. Hoang. 1995. An improved system for gene replacement and xylE fusion analysis in Pseudomonas aeruginosa. Gene 158:15-22.
[0267] Sheahan K L, Cordero C L & Satchell K J (2004) Identification of a domain within the multifunctional Vibrio cholerae RTX toxin that covalently cross-links actin. Proc Natl Acad Sci USA 101: 9798-9803.
[0268] Shen K, Sayeed S, Antalis P et al. (2006) Extensive genomic plasticity in Pseudomonas aeruginosa revealed by identification and distribution studies of novel genes among clinical isolates. Infect Immun 74: 5272-5283.
[0269] Shinomiya T & Ina S (1989) Genetic comparison of bacteriophage PS17 and Pseudomonas aeruginosa R-type pyocin. J Bacteriol 171: 2287-2292.
[0270] Simon, R., U. Priefer, and A. Puhler. 1983. A broad host range mobilization system for in vivo genetic engineering: transposon mutagenesis in gram negative bacteria. Bio/Technology 1:784-791.
[0271] Spangenberg, C., R. Fislage, U. Roniling, and B. Tummler. 1997. Disrespectful type IV pilins. Mol. Microbiol. 25:203-204.
[0272] Spencer D H, Kas A, Smith E E et al. (2003) Whole-genome sequence variation among multiple isolates of Pseudomonas aeruginosa. J Bacteriol 185: 1316-1325.
[0273] Stover, C. K., X. Q. Pham, A. L. Erwin, S. D. Mizoguchi, P. Warrener, M. J. Hickey, F. S. L. Brinkman, W. O. Hufnagle, D. J. Kowalk, M. Lagrou, R. L. Garber, L. Goltry, E. Tolentino, S. Westbrock-Wadman, Y. Yuan, L. L. Brody, S. N. Coulter, K. R. Folger, A. Kas, K. Larbig, R. Lim, K. Smith, D. Spencer, G. K.-S. Wong, Z. Wu, I. T. Paulsen, J. Reizer, M. H. Saler, R. E. W. Hancock, S. Lory, and M. V. Olson. 2000. Complete genome sequence of Pseudomonas aeruginosa PAO1, an opportunistic pathogen. Nature 406:959-964.
[0274] Stryjewski, M. E., and D. J. Sexton. 2003. Pseudomonas aeruginosa infections in specific types of patients and clinical settings, p. 1-15. In A. R. Hauser and J. Rello (ed.), Severe infections caused by Pseudomonas aeruginosa, vol. 7. Kluwer Academic Publishers, Boston, Mass.
[0275] Vetting M W, Hegde S S, Fajardo J E, Fiser A, Roderick S L, Takiff H E & Blanchard J S (2006) Pentapeptide repeat proteins. Biochemistry 45: 1-10.
[0276] Vogel, H. J., and D. M. Bonner. 1956. Acetylornithinase of Escherichia coli: partial purification and some properties. J. Biol. Chem. 218:97-106.
[0277] Walker J E, Saraste M, Runswick M J & Gay N J (1982) Distantly related sequences in the alpha- and beta-subunits of ATP synthase, myosin, kinases and other ATP-requiring enzymes and a common nucleotide binding fold. Embo J 1: 945-951.
[0278] Wang Y D, Zhao S & Hill C W (1998) Rhs elements comprise three subfamilies which diverged prior to acquisition by Escherichia coli. J. Bacteriol. 180: 4102-4110.
[0279] White A K & Metcalf W W (2004) The htx and ptx operons of Pseudomonas Stutzeri WM88 are new members of the pho regulon. J Bacteriol 186: 5876-5882.
[0280] Wilderman P J, Vasil A I, Johnson Z & Vasil M L (2001) Genetic and biochemical analyses of a eukaryotic-like phospholipase D of Pseudomonas aeruginosa suggest horizontal acquisition and a role for persistence in a chronic pulmonary infection model. Mol. Microbiol. 39: 291-303.
[0281] Williams, K. P. 2002. Integration sites for genetic elements in prokaryotic tRNA and tmRNA genes: sublocation preference of integrase subfamilies. Nucleic Acids Res. 30:866-875.
[0282] Wolfgang, M. C., B. R. Kulasekara, X. Liang, D. Boyd, K. Wu, Q. Yang, C. G. Miyada, and S. Lory. 2003. Conservation of genome content and virulence determinants among clinical and environmental isolates of Pseudomonas aeruginosa. Proc. Natl. Acad. Sci. USA 100:8484-8489.
[0283] Woods, D. E., J. S. Lam, W. Paranchych, D. P. Speert, M. Campbell, and A. J. Godfrey. 1997. Correlation of Pseudomonas aeruginosa virulence factors from clinical and environmental isolates with pathogenicity in the neutropenic mouse. Can. J. Microbiol. 43:541-551.
[0284] Wurdemann, D., and B. Tummler. 2007. In silico comparison of pKLC102-like genomic islands of Pseudomonas aeruginosa. FEMS Microbiol. Lett. 275:244-249.
[0285] Yan Y, Yang J, Dou Y, et al. (2008) Nitrogen fixation island and rhizosphere competence traits in the genome of root-associated Pseudomonas stutzeri A1501. Proc. Natl. Acad. Sci. USA 105: 7564-7569.

[0286] In the foregoing description, certain terms have been used for brevity, clearness, and understanding. No unnecessary limitations are to be implied therefrom beyond the requirement of the prior art because such terms are used for descriptive purposes and are intended to be broadly construed. The different compositions and method steps described herein may be used alone or in combination with other compositions and method steps. It is to be expected that various equivalents, alternatives and modifications are possible. Citations to a number of non-patent references are made herein. The cited references are incorporated by reference herein in their entireties. In the event that there is an inconsistency between a definition of a term in the specification as compared to a definition of the term in a cited reference, the term should be interpreted based on the definition in the specification.

### Tables

TABLE 1
Characteristics of the 21 distinct subtractive hybridization
products with similarity to known sequences

| | No. of | |
|---|---|---|
| Region | clones | % Identity^{a} |
| Serotype 01 O-antigen | 12 | 95-99 |
| biosynthesis cluster | | |
| pilA gene | 1 | 99 |
| Phage φCTX DNA | 1 | 89^{b} |
| PAPI-1 | 1 | 95 |
| Rhs element | 2 | 91 (AA) |
| Site-specific recombinase | 2 | 37 (AA) |
| Phage-related protein | 1 | 33 (AA) |
| Zinc-binding transcriptional | 1 | 31 (AA) |
| regulator | | |

^{a}Nucleotide sequence identity, unless indicated as amino acid sequence identity (AA).
^{b}The sequence was 701 bp long and showed 89% similarity to φCTX in a 100-bp region but no significant similarity in the remaining sequence.

TABLE 2
ORFs of PAGI-5.

| | | | | | | | Homolog | | | | |
|---|---|---|---|---|---|---|---|---|---|---|---|
| | | | | | AA | GC | Accession | Gene | E-value | | Conserved |
| ORF | Annotation result | Orient | Start | Stop | length | % | number | name | (% identity) | | domain |
| 5PG1 | Putative integrase | − | 1442 | 162 | 426 | 60.7 | ABJ10138 | xerC | 0.0 | (98) | cd01182 |
| 5PG2 | Conserved hypothetical protein | − | 3358 | 1439 | 639 | 59.2 | AAP22591 | | 0.0 | (98) | pfam07514 |
| 5PG3 | Hypothetical protein | − | 3705 | 3607 | 32 | 60.6 | None | | | | None |
| 5PG4 | Possible methyltransferase | − | 5139 | 3877 | 420 | 53.4 | ABF09701 | | 5 × 10−100 | (46) | pfam01555 |
| 5PG5 | Hypothetical protein | + | 5620 | 7653 | 677 | 48.9 | AAX68258 | | 5 × 10−67 | (30) | None |
| 5PG6 | Hypothetical protein | − | 8260 | 7949 | 103 | 50.0 | None | | | | None |
| 5PG7 | Hypothetical protein | + | 8336 | 9391 | 351 | 49.6 | None | | | | None |
| 5PG8 | Plasmid stabilization system | − | 10160 | 9810 | 116 | 60.7 | EAZ62002 | parE | 3 × 10−61 | (100) | COG3668 |
| | protein | | | | | | | | | | |
| 5PG9 | Transcriptional regulator protein | − | 10436 | 10164 | 90 | 60.8 | AAP22603 | nikR | 3 × 10−44 | (100) | COG3609 |
| 5PG10 | Hypothetical protein similar to | + | 10620 | 10883 | 87 | 57.2 | AAG04531 | | 1 × 10−42 | (98) | pfam01527 |
| | PA0986 | | | | | | | | | | |
| 5PG11 | Transposase and inactivated | + | 11113 | 11766 | 217 | 60.2 | EAZ53156 | | 3 × 10−126 | (98) | pfam00655 |
| | derivatives | | | | | | | | | | |
| 5PG12 | Hypothetical protein | + | 11803 | 12156 | 117 | 50.3 | ABJ13911 | | 2 × 10−20 | (59) | None |
| 5PG13 | Conserved hypothetical protein | − | 13721 | 12186 | 511 | 59.2 | AAP22582 | | 0.0 | (96) | None |
| 5PG14 | Hypothetical protein | − | 14065 | 13718 | 115 | 62.9 | AAP94685 | | 8 × 10−58 | (100) | None |
| 5PG15 | Putative integral membrane protein | − | 15447 | 14065 | 460 | 64.6 | EAZ62006 | | 0.0 | (99) | None |
| 5PG16 | Conserved hypothetical protein | − | 16409 | 15471 | 312 | 65.8 | AAP94687 | | 0.0 | (100) | pfam07513 |
| 5PG17 | Putative integral membrane protein | − | 16840 | 16409 | 143 | 62.5 | AAP94688 | | 2 × 10−74 | (100) | pfam07511 |
| 5PG18 | hypothetical protein | + | 18978 | 19196 | 72 | 55.3 | EAZ62011 | | 3 × 10−33 | (100) | None |
| 5PG19 | Hypothetical outer membrane | − | 19852 | 19193 | 219 | 63.0 | EAZ62012 | dsbG | 8 × 10−124 | (100) | cd03023 |
| | protein | | | | | | | | | | |
| 5PG20 | Hypothetical protein | − | 20133 | 19849 | 94 | 58.2 | EAZ62013 | | 7 × 10−44 | (100) | None |
| 5PG21 | Type IV, secretory pathway, | − | 22934 | 20130 | 934 | 63.5 | ABR82757 | | 0.0 | (100) | COG3451 |
| | VirB4 components | | | | | | | | | | |
| 5PG22 | Conserved hypothetical protein | − | 23419 | 23072 | 115 | 64.1 | EAZ62014 | | 6 × 10−63 | (100) | None |
| 5PG23 | Conserved hypothetical protein | − | 24998 | 23493 | 501 | 64.1 | EAZ62015 | | 0.0 | (99) | None |
| 5PG24 | Conserved hypothetical protein | − | 25866 | 24982 | 294 | 66.1 | EAZ56168 | | 1 × 10−164 | (99) | None |
| 5PG25 | Hypothetical protein | − | 26522 | 25863 | 219 | 61.1 | EAZ62017 | | 7 × 10−128 | (100) | None |
| 5PG26 | Hypothetical protein | − | 26905 | 26519 | 128 | 66.4 | EAZ16018 | | 1 × 10−66 | (100) | None |
| 5PG27 | Hypothetical protein | − | 27272 | 26916 | 118 | 58.1 | EAZ62019 | | 6 × 10−61 | (100) | None |
| 5PG28 | Conserved hypothetical protein | − | 27529 | 27290 | 79 | 63.3 | ABJ3895 | | 6 × 10−34 | (94) | None |
| 5PG29 | Putative candidate type III effector | − | 27864 | 27526 | 112 | 66.4 | EAZ62021 | | 6 × 10−56 | (96) | pfam09686 |
| | Hop protein | | | | | | | | | | |
| 5PG30 | Aconitase H | − | 28256 | 27957 | 99 | 58.0 | ABD94651 | | 3 × 10−52 | (97) | None |
| 5PG31 | Putative pathogeuesis-related | − | 29894 | 28785 | 369 | 46.8 | EAZ62024 | | 0.0 | (99) | None |
| | protein | | | | | | | | | | |
| 5PG32 | Putative helicase | − | 31507 | 30026 | 493 | 59.8 | AAP22562 | | 0.0 | (98) | pfam00580 |
| 5PG33 | Cytochrome c biogenesis factor | − | 32264 | 31518 | 248 | 61.2 | ABD94655 | | 1 × 10−139 | (98) | None |
| 5GP34 | TraG/TraD family protein protein | − | 34495 | 32264 | 743 | 64.7 | EAZ56177 | | 0.0 | (99) | pfam02534 |
| 5PG35 | dTDP-D-glucose 4,6-dehydrase | − | 34768 | 34499 | 89 | 61.5 | ABR85411 | | 7 × 10−44 | (100) | None |
| 5PG36 | Conserved hypothetical protein | − | 35227 | 34777 | 166 | 65.5 | ABR84905 | | 6 × 10−89 | (100) | None |
| 5PG37 | Soluble lytic murein | − | 35855 | 35274 | 193 | 64.8 | ABJ13877 | | 2 × 10−106 | (99) | None |
| | transglycosylase | | | | | | | | | | |
| 5PG38 | Hypothetical protein | − | 36595 | 35840 | 251 | 65.5 | ABR86054 | | 1 × 10−132 | (97) | None |
| 5PG39 | Conserved hypothetical protein | − | 37295 | 36606 | 229 | 63.5 | EAZ56182 | | 1 × 10−127 | (99) | None |
| 5PG40 | Hypothetical protein | + | 37513 | 37785 | 90 | 56.0 | ABR13381 | | 6 × 10−45 | (100) | None |
| 5PG41 | Hypothetical protein | + | 38352 | 38489 | 45 | 59.4 | None | | | | None |
| 5PG42 | Hypothetical protein | + | 38591 | 38749 | 52 | 43.4 | None | | | | None |
| 5PG43 | Hypothetical protein | − | 39346 | 38954 | 130 | 46.1 | ABH09854 | | 3 × 10−17 | (42) | None |
| 5PG44 | Hypothetical protein | − | 39901 | 39698 | 67 | 56.9 | EAZ56183 | | 1 × 10−29 | (95) | None |
| 5PG45 | Hypothetical protein | − | 40494 | 39898 | 198 | 60.5 | EAZ56184 | | 4 × 10−100 | (91) | cd00198 |
| 5PG46 | Hypothetical protein | + | 40887 | 41069 | 60 | 62.8 | None | | | | None |
| 5PG47 | Hypothetical protein | − | 41462 | 41088 | 124 | 57.3 | None | | | | None |
| 5PG48 | Hypothetical protein | − | 43009 | 42326 | 227 | 61.3 | EAZ56186 | | 1 × 10−123 | (95) | pfam02586 |
| 5PG49 | SOS-response transcriptional | + | 43114 | 43545 | 143 | 61.8 | EAZ56187 | | 3 × 10−76 | (99) | COG1974 |
| | repressor | | | | | | | | | | |
| 5PG50 | Nucleotidyltransferase (fragment) | + | 43532 | 43672 | 46 | 58.9 | EAZ56188 | | 1 × 10−15 | (100) | cd01700 |
| 5PG51 | Site-specific recombinase, phage | + | 43770 | 44927 | 385 | 57.0 | AAZ35387 | | 3 × 10−97 | (82) | cd00798 |
| | integrase family | | | | | | | | | | |
| 5PG52 | Phage integrase | + | 44938 | 46554 | 537 | 48.8 | ABR80851 | | 0.0 | (99) | cd00798 |
| 5PG53 | Phage integrase like protein | + | 46544 | 48388 | 614 | 52.0 | YP_00134593 | | 0.0 | (100) | cd01182 |
| 5PG54 | TetR family transcriptional | + | 48385 | 48813 | 142 | 55.2 | AAP22553 | | 4 × 10−46 | (72) | None |
| | regulator | | | | | | | | | | |
| 5PG55 | Hypothetical protein | + | 49052 | 49234 | 60 | 61.2 | ABR84232 | | 4 × 10−26 | (100) | None |
| 5PG56 | MerR protein | − | 49787 | 49377 | 136 | 60.6 | ABR86667 | merR | 6 × 10−73 | (100) | cd1108 |
| 5PG57 | MerT protein | + | 49859 | 50209 | 116 | 61.0 | ABR82023 | merT | 5 × 10−59 | (100) | pfam02411 |
| 5PG58 | Periplasmic mereuic ion binding | + | 50223 | 50498 | 91 | 61.6 | ABR81298 | | 7 × 10−44 | (100) | cd00371 |
| | protein | | | | | | | | | | |
| 5PG59 | MerC | + | 50511 | 50945 | 144 | 63.7 | ABR83604 | merC | 1 × 10−75 | (100) | pfam03203 |
| 5PG60 | MerA | + | 50978 | 52660 | 560 | 65.2 | ABR83086 | merA | 0.0 | (100) | cd00371 |
| 5PG61 | Hypothetical protein | + | 52679 | 53095 | 138 | 64.5 | CAC80080 | | 3 × 10−45 | (78) | None |
| 5PG62 | Nucleotidyltransferase (fragment) | + | 53506 | 54660 | 384 | 61.8 | EAZ56188 | | 0.0 | (99) | cd01700 |
| 5PG63 | putative helicase | − | 57546 | 55297 | 749 | 63.6 | AAP22548 | | 0.0 | (99) | cd00079 |
| 5PG64 | Type I restriction-modification | − | 59097 | 57652 | 481 | 63.9 | AAP22547 | | 0.0 | (99) | COG0286 |
| | system methyltransferase | | | | | | | | | | |
| | subunit | | | | | | | | | | |
| 5PG65 | Hypothetical protein | − | 59732 | 59127 | 201 | 63.5 | AAP22600 | | 1 × 10−112 | (99) | None |
| 5PG66 | Conserved hypothetical protein | − | 60078 | 59824 | 84 | 61.6 | EAZ62038 | | 8 × 10−41 | (98) | None |
| 5PG67 | Conserved hypothetical protein | − | 60508 | 60146 | 120 | 58.7 | EAZ62039 | | 9 × 10−66 | (100) | None |
| 5PG68 | Conserved hypothetical protein | − | 61381 | 60611 | 256 | 61.5 | AAP22544 | | 2 × 10−127 | (93) | None |
| 5PG69 | Conserved hypothetical protein | − | 61788 | 61438 | 116 | 63.2 | ABR86730 | | 1 × 10−59 | (98) | None |
| 5PG70 | Conserved hypothetical protein | − | 62731 | 62024 | 235 | 53.0 | EAZ56198 | | 4 × 10−137 | (99) | None |
| 5PG71 | Hypothetical protein | − | 63123 | 62833 | 96 | 49.8 | EAZ56199 | | 7 × 10−48 | (94) | None |
| 5PG72 | Conserved hypothetical protein | − | 63449 | 63216 | 77 | 51.3 | EAZ62044 | | 4 × 10−36 | (94) | None |
| 5PG73 | Hypothetical protein | − | 63645 | 63487 | 52 | 56.6 | EAZ62045 | | 4 × 10−21 | (94) | None |
| SPG74 | Conerved hypothetical protein | − | 64270 | 63782 | 162 | 57.3 | ABJ13854 | | 9 × 10−90 | (99) | None |
| 5PG75 | Hypothetical protein | − | 64729 | 64595 | 44 | 52.6 | ABJ13853 | | 5 × 10−18 | (100) | None |
| 5PG76 | Hypothetical protein | − | 64907 | 64731 | 58 | 53.7 | AAP22537 | | 9 × 10−13 | (64) | None |
| 5PG77 | Hypothetical protein | − | 65371 | 64982 | 129 | 60.5 | EAZ62048 | | 3 × 10−66 | (97) | None |
| 5PG78 | Hypothetical protein | + | 65566 | 65742 | 58 | 61.6 | None | | | | None |
| 5PG79 | Hypothetical protein | + | 65901 | 65990 | 29 | 56.7 | EAZ56205 | | 2 × 10−17 | (96) | None |
| 5PG80 | PilM | − | 66723 | 66286 | 145 | 67.4 | AAP22535 | pilM | 7 × 10−75 | (98) | pfam07419 |
| 5PG81 | PilV | − | 68080 | 66752 | 442 | 63.7 | EAZ62050 | pilV | 0.0 | (99) | pfam04917 |
| 5PG82 | PilU | − | 69026 | 68085 | 313 | 65.5 | AAP22533 | pilU | 1 × 10−177 | (99) | cd01131 |
| 5PG83 | PilS | − | 69553 | 69023 | 176 | 60.1 | ZP_01363763 | pilS | 8 × 10−94 | (100) | pfam08805 |
| 5PG84 | PilR | − | 69673 | 69575 | 32 | 57.6 | ABJ13846 | pilR | 2 × 10−9 | (100) | None |
| 5PG85 | Type IV B pilus protein | − | 70656 | 69670 | 328 | 64.0 | ABJ13846 | pilR | 2 × 10−149 | (98) | pfam00482 |
| 5PG86 | PilQ2 | − | 71276 | 70656 | 206 | 64.9 | ABJ13845 | pilQ | 2 × 10−121 | (99) | cd01129 |
| 5PG87 | PilQ | − | 72237 | 71332 | 301 | 62.0 | AAP22531 | pilQ | 2 × 10−160 | (99) | cd01129 |
| 5PG88 | PilP | − | 72779 | 72246 | 177 | 71.2 | EAZ62055 | pilP | 8 × 10−93 | (98) | None |
| 5PG89 | PilO | − | 74094 | 72769 | 441 | 63.9 | ZP_01363767 | pilO | 0.0 | (99) | pfam06864 |
| 5PG90 | PilN | − | 75807 | 74098 | 569 | 63.8 | ABR83573 | pilN | 0.0 | (99) | pfam00263 |
| 5PG91 | PilL | − | 76931 | 75807 | 374 | 65.6 | AAP22527 | pilL | 0.0 | (95) | None |
| 5PG92 | Putative DNA helicase | − | 78992 | 77019 | 657 | 64.4 | ABJ13838 | | 0.0 | (98) | cd00269 |
| 5PG93 | Hypothetical protein | − | 80878 | 78989 | 629 | 60.8 | AAP22524 | | 0.0 | (94) | None |
| 5PG94 | Hypothetical protein | − | 81742 | 80990 | 250 | 57.5 | ABR83709 | | 5 × 10−146 | (100) | None |
| 5PG95 | Putative TopA topoisomerase | − | 83670 | 81751 | 639 | 61.4 | ABR81659 | | 0.0 | (99) | cd00186 |
| 5PG96 | Hypothetical protein | − | 84391 | 81197 | 64 | 55.4 | None | | | | None |
| 5PG97 | Single stranded DNA binding | − | 84983 | 84495 | 162 | 61.3 | EAZ62067 | ssb | 9 × 10−90 | (98) | cd04496 |
| | protein | | | | | | | | | | |
| 5PG98 | Conserved hypothetical protein | − | 85530 | 84997 | 177 | 60.9 | EAZ56223 | | 2 × 10−97 | (10) | None |
| 5PG99 | Conserved hypothetical protein | − | 86264 | 85536 | 242 | 62.7 | ABR84248 | | 2 × 10−139 | (100) | pfam08900 |
| 5PG100 | Hypothetical protein | − | 86618 | 86421 | 65 | 55.6 | ZP_01363778 | | 5 × 10−24 | (100) | None |
| 5PG101 | Hypothetical protein | − | 87205 | 86966 | 79 | 46.2 | ABJ13829 | | 1 × 10−37 | (96) | None |
| 5PG102 | Hypothetical protein | − | 87555 | 87196 | 119 | 62.8 | ABR86721 | | 1 × 10−21 | (69) | None |
| 5PG103 | Hypothetical protein | − | 86732 | 87806 | 308 | 59.0 | ABR85685 | | 7 × 10−156 | (97) | None |
| 5PG104 | Hypothetical protein | − | 88880 | 88698 | 60 | 56.8 | ABJ13827 | | 3 × 10−22 | (98) | None |
| 5PG105 | Hypothetical protein | − | 89644 | 88877 | 255 | 57.8 | ABJ13826 | | 6 × 10−142 | (97) | None |
| 5PG106 | Hypothetical protein | − | 89764 | 89672 | 30 | 62.4 | AAP22516 | | 2 × 10−19 | (100) | None |
| 5PG107 | Hypothetical protein | − | 91409 | 89775 | 544 | 58.9 | AAP22516 | | 0.0 | (95) | None |
| 5PG108 | Putative DNA binding protein | − | 91675 | 91406 | 89 | 59.6 | ABR81832 | | 1 × 10−40 | (95) | pfam03869 |
| 5PG109 | Hypothetical protein | − | 92157 | 91696 | 153 | 63.0 | ABJ13823 | | 1 × 10−41 | (98) | pfam04245 |
| 5PG110 | Hypothetical protein | − | 92390 | 92157 | 77 | 65.4 | ABJ13822 | | 7 × 10−18 | (100) | None |
| 5PG111 | Hypothetical protein | − | 92622 | 92383 | 79 | 64.6 | EAZ56231 | | 1 × 10−26 | (85) | None |
| 5PG112 | Hypothetical protein | − | 92872 | 92615 | 85 | 60.5 | EAZ62077 | | 1 × 10−44 | (100) | None |
| 5PG113 | Hypothetical protein | − | 93396 | 92869 | 175 | 60.6 | EAZ56233 | | 9 × 10−98 | (99) | None |
| 5PG114 | Hypothetical protein | − | 93571 | 93386 | 61 | 59.1 | None | | | | None |
| 5PG115 | Replicative DNA helicase | − | 94914 | 93568 | 448 | 60.8 | EAZ56234 | dnaB | 0.0 | (99) | cd00984 |
| 5PG116 | Hypothetical protein | − | 95663 | 94962 | 233 | 64.4 | EAZ56237 | | 2 × 10−133 | (100) | None |
| 5PG117 | Hypothetical protein | − | 96349 | 95663 | 228 | 64.5 | EAZ56238 | | 2 × 10−127 | (98) | None |
| 5PG118 | Hypothetical protein | − | 97056 | 96346 | 236 | 61.9 | AAP22503 | | 4 × 10−106 | (77) | None |
| 5PG119 | Hypothetical protein | − | 97559 | 97062 | 165 | 62.4 | AAP22502 | | 2 × 10−88 | (99) | None |
| 5PG120 | Hypothetical protein | − | 98293 | 97556 | 245 | 59.9 | EAZ56241 | | 7 × 10−140 | (100) | None |
| 5PG121 | Chromosome partitioning | − | 99161 | 98295 | 288 | 60.1 | EAZ56242 | [symbol] oj | 2 × 10−164 | (98) | COG1192 |
| | related protein | | | | | | | | | | |

[symbol]

indicates data missing or illegible when filed

TABLE 3
Primers used in screening the fosmid library

| Subtrac- | | | | |
|---|---|---|---|---|
| tive | | | | |
| hybridi- | | | | SEQ |
| zation | Sequence | Primer | | ID |
| product | similarity | name | Sequence | NO: |
| 2-14 | — | 2-14F | AGAATTTGACATGTTGCAGCG | 266 |
| | | 2-14R | AGCTTGCTCTCGGTCAATCTC | 267 |
| 2-53 | — | 2-53F | TACCCTATGACCATGCCCATT | 268 |
| | | 2-53R | TCAACCCCGAACAGCCTGA | 269 |
| 2-5 | PAPI-1 | 2-5F | ACTTGTAGACCAGGTGCGG | 270 |
| | | 2-5R | TGGATCATCACTGAGGCAGA | 271 |

TABLE 4
Characteristics of PSE9 genomic islands

| Genomic | Size | | Number of | | Insertion |
|---|---|---|---|---|---|
| island | (bp) | Location* | predicted ORFs | G + C % | site |
| PAGI-5^{†} | 99 276 | 1 061 197 | 121 | 59.6 | tRNA^{Lys} |
| PAGI-6 | 44 302 | 5 810 047 | 47 | 60.8 | tRNA^{Thr} |
| PAGI-7 | 22 479 | 4 439 857 | 20 | 55.8 | |
| PAGI-8 | 16 195 | 5 798 636 | 11 | 54.1 | tRNA^{Phe} |
| PAGI-9 | 7192 | 4 294 706 | 1 | 61.6 | |
| PAGI-10 | 2194 | 2 759 146 | 1 | 52.7 | |
| PAGI-11 | 2003 | 2 116 708 | 0 | 50.5 | |

*Genomic locations are given with respect to the PAO1 genome nomenclature (Stover et al., 2000).
^{†}The identification and characterization of PAGI-5 is presented elsewhere (Battle et al., 2008). It is included here for completeness.

TABLE 5
Distribution of PAGI sequences throughout the collection of PSE
clinical isolates

| Isolate | PAGI-6 | PAGI-7 | PAGI-8 | PAGI-9 | PAGI-10 |
|---|---|---|---|---|---|
| PSE1 | + | | | | + |
| PSE2 | | + | | + | |
| PSE3 | | + | | + | |
| PSE4 | | | | | + |
| PSE5 | | + | | + | |
| PSE6 | | + | | + | |
| PSE7 | | | | | + |
| PSE8 | | + | | + | |
| PSE9 | + | + | + | + | + |
| PSE10 | | | | | + |
| PSE11 | | | | | + |
| PSE12 | | + | | + | |
| PSE13 | | | | | + |
| PSE14 | | | | | + |
| PSE15 | | | | | + |
| PSE16 | | + | | + | |
| PSE17 | | | | | + |
| PSE18 | | | | | + |
| PSE19 | | + | | + | |
| PSE20 | | | | | + |
| PSE21 | | | | | + |
| PSE22 | | | | | + |
| PSE23 | | + | | + | |
| PSE24 | | | | | + |
| PSE25 | | + | | + | |
| PSE26 | | + | | + | |
| PSE27 | | + | | + | |
| PSE28 | | | | | + |
| PSE29 | | | | | + |
| PSE30 | | | | | + |
| PSE33 | | + | | + | |
| PSE35 | | | | | + |
| PSE37 | | + | | + | |
| PSE39 | | | | | + |
| PSE41 | | + | | + | |

TABLE 6
Annotation of ORFs in PAGI-6

| | | | | | | | Homolog | | | | |
|---|---|---|---|---|---|---|---|---|---|---|---|
| | | | | | AA | | Access. | Gene | | | Conserved |
| ORF | Annotation result | Orient | Start | Stop | length | GC % | Number | name | E-value (% identity) | | domain |
| 6PG1 | Predicted capsid packaging protein | − | 3342 | 2287 | 351 | 62.4 | ACD38654 | Q | 0.0 | (96) | COG5518 |
| 6PG2 | Predicted ATPase terminase | − | 5123 | 3342 | 593 | 63.1 | BAA36228 | P | 0.0 | (99) | COG5484 |
| | subunit | | | | | | | | | | pfam03237 |
| 6PG3 | Presumed capsid scaffold | + | 5258 | 6079 | 273 | 64.2 | BAA36229 | O | 2 × 10−133 | (99) | pfam05929 |
| 6PG4 | Predicted major capsid protein | + | 6115 | 7131 | 338 | 63.8 | BAA36230 | N | 2 × 10−172 | (99) | pfam05125 |
| 6PG5 | Predicted terminase subunit | + | 7137 | 7838 | 233 | 66.5 | ACD38658 | M | 1 × 10−130 | (100) | pfam05944 |
| 6PG6 | Predicted capsid completion | + | 7942 | 8403 | 153 | 66.2 | ACD38659 | L | 4 × 10−83 | (100) | pfam05926 |
| | protein | | | | | | | | | | |
| 6PG7 | Hypothetical protein | + | 8403 | 8615 | 70 | 69.5 | ACD38660 | X | 2 × 10−33 | (98) | pfam05489 |
| 6PG8 | Hypothetical protein | + | 8640 | 8993 | 117 | 68.6 | BAA36235 | | 3 × 10−19 | (100) | None |
| 6PG9 | Hypothetical protein | + | 8995 | 9267 | 90 | 67.4 | ACD38662 | | 2 × 10−41 | (100) | pfam05449 |
| 6PG10 | Hypothetical protein | + | 9264 | 10070 | 268 | 65.7 | BAA36237 | | 3 × 10−145 | (95) | pfam01471 |
| 6PG11 | Hypothetical protein | + | 10067 | 10309 | 80 | 60.1 | None | | | | None |
| 6PG12 | Predicted lysis | + | 10306 | 10767 | 153 | 68.4 | BAA36238 | lysB | 1 × 10−57 | (95) | None |
| 6PG13 | Predicted tail completion | + | 10845 | 11381 | 178 | 65.5 | ACD38665 | R | 5 × 10−98 | (99) | pfam06891 |
| 6PG14 | Predicted tail completion | + | 11374 | 11832 | 152 | 65.1 | BAA36241 | S | 2 × 10−73 | (91) | pfam05069 |
| 6PG15 | Hypothetical protein | + | 11842 | 12270 | 142 | 55.2 | ACD38666 | | 9 × 10−79 | (100) | None |
| 6PG16 | Predicted baseplate | + | 12448 | 13020 | 190 | 66.7 | ACD38667 | V | 4 × 10−102 | (98) | pfam04717 |
| 6PG17 | Predicted baseplate | + | 13017 | 13361 | 114 | 65.5 | ACD38668 | W | 1 × 10−59 | (99) | pfam04965 |
| 6PG18 | Predicted baseplate or tail fiber | − | 13358 | 14272 | 304 | 68.0 | BAA36245 | J | 1 × 10−171 | (99) | pfam04865 |
| | base | | | | | | | | | | |
| 6PG19 | Hypothetical protein | + | 14272 | 14808 | 178 | 67.6 | BAA36246 | I | 6 × 10−96 | (99) | COG4385 |
| 6PG20 | Hypothetical protein | + | 14810 | 17167 | 785 | 63.2 | BAA36247 | H | 0.0 | (87) | COG5301 |
| 6PG21 | Putative tail fiber assembly protein | + | 17164 | 17628 | 154 | 66.7 | BAA36248 | | 5 × 10−41 | (60) | None |
| 6PG22 | Putative tail sheath protein | + | 17719 | 18894 | 391 | 64.6 | BAA36249 | FI | 0.0 | (98) | pfam04984 |
| 6PG23 | Phage tail tube protein | + | 18951 | 19466 | 171 | 64.5 | ACD38674 | FII | 5 × 10−93 | (97) | pfam04985 |
| 6PG24 | Phage tail E | + | 19521 | 19850 | 109 | 65.8 | BAA36251 | E | 1 × 10−44 | (96) | pfam06158 |
| 6PG25 | Hypothetical protein | + | 19859 | 19978 | 39 | 65.0 | BAA36252 | E | 4 × 10−14 | (100) | None |
| 6PG26 | Phage related tail protein | + | 19968 | 22715 | 915 | 67.4 | ACD38677 | T | 0.0 | (95) | COG5283 |
| 6PG27 | Phage related tail protein | + | 22721 | 23161 | 146 | 68.0 | BAA36254 | U | 2 × 10−77 | (99) | pfam06995 |
| 6PG28 | Phage late control D | + | 23158 | 24444 | 428 | 67.9 | BAA36255 | D | 0.0 | (95) | pfam05954 |
| 6PG29 | Hypothetical protein | + | 25328 | 25861 | 177 | 44.9 | None | | | | None |
| 6PG30 | Hypothetical protein | − | 26265 | 25915 | 116 | 58.1 | BAA36258 | | 2 × 10−55 | (89) | None |
| 6PG31 | Hypothetical protein | − | 26434 | 26318 | 38 | 60.7 | BAA36259 | | 2 × 10−11 | (94) | None |
| 6PG32 | Hypothetical protein | + | 27266 | 27736 | 156 | 66.7 | BAA36261 | | 1 × 10−83 | (98) | None |
| 6PG33 | Hypothetical protein | + | 27733 | 28026 | 97 | 65.3 | BAA36262 | ogr | 4 × 10−50 | (97) | None |
| 6PG34 | Hypothetical protein | + | 28023 | 28373 | 116 | 63.5 | ACD38690 | | 8 × 10−60 | | None |
| 6PG35 | Hypothetical protein | + | 28444 | 28677 | 77 | 63.2 | BAA36264 | | 2 × 10−38 | (100) | None |
| 6PG36 | Hypothetical protein | + | 28674 | 31394 | 906 | 64.4 | BAA36265 | | 0.0 | (96) | cd1029 |
| 6PG37 | Hypothetical protein | + | 31439 | 31792 | 117 | 64.1 | ACD38693 | | 6 × 10−61 | (97) | None |
| 6PG38 | Hypothetical protein | + | 31804 | 32010 | 68 | 69.6 | BAA36267 | | 8 × 10−31 | (98) | pfam01258 |
| 6PG39 | Site-specific DNA methylase | + | 32314 | 33999 | 561 | 67.1 | BAA36269 | | 0.0 | (73) | COG0270 |
| | | | | | | | | | | | Pfam00145 |
| 6PG40 | Hypothetical protein | + | 34010 | 34198 | 62 | 55.6 | BAA36270 | | 1 × 10−6 | (76) | None |
| 6PG41 | Hypothetical protein | + | 34195 | 34407 | 70 | 59.2 | None | | | | None |
| 6PG42 | Site specific recombinase phage | + | 34404 | 35552 | 382 | 61.0 | AAZ34138 | | 1 × 10−163 | (70) | cd00800 |
| | integrase family | | | | | | | | | | |
| 6PG43 | Putative bacteriophage protein | + | 35794 | 36015 | 73 | 56.8 | AAO69527 | | 3 × 10−10 | (59) | None |
| 6PG44 | Prophage maint system killer | + | 36019 | 36525 | 168 | 57.0 | AAO69526 | | 2 × 10−43 | (58) | COG3654 |
| | protein | | | | | | | | | | |
| 6PG45 | Phage integrase | + | 37061 | 38380 | 439 | 60.8 | ACA75411 | | 0.0 | (98) | cd00801 |
| 6PG46 | Phage integrase | + | 39311 | 40291 | 326 | 59.2 | ACA75412 | | 3 × 10−161 | (86) | None |
| 6PG47 | Hypothetical protein | + | 42667 | 42765 | 32 | 33.7 | None | | | | None |

TABLE 7
Annotation of ORFs in PAGI-7

| | | | | | | | Homolog | | | | |
|---|---|---|---|---|---|---|---|---|---|---|---|
| | | | | | AA | | Access. | Gene | | | Conserved |
| ORF | Annotation result | Orient | Start | Stop | length | GC % | number | name | E-value (% identity) | | domain |
| 7PG1 | Site-specific recombinase | + | 115 | 1581 | 488 | 46.4 | ABP78291 | | 0.0 | (80) | cd01182 |
| 7PG2 | Hypothetical protein | − | 3320 | 3228 | 30 | 50.5 | None | | | | None |
| 7PG3 | Site-specific recombinase | + | 3725 | 5551 | 608 | 46.8 | ABP78293 | | 0.0 | (76) | None |
| 7PG4 | Predicted transcriptional regulator | − | 6336 | 6115 | 73 | 58.6 | BAF32907 | | 3 × 10−30 | (90) | cd00093 |
| 7PG5 | Conserved hypothetical protein | + | 6441 | 7019 | 192 | 57.5 | ACD39184 | | 5 × 10−98 | (92) | None |
| 7PG6 | Type III restriction enzyme | + | 7016 | 8416 | 466 | 57.4 | ACD39185 | | 1 × 10−117 | (50) | smart00487 |
| | | | | | | | | | | | smart00490 |
| 7PG7 | Hypothetical protein | + | 8507 | 8809 | 100 | 52.5 | ACD39186 | | 2 × 10−20 | (58) | None |
| 7PG8 | Hypothetical protein | − | 9036 | 8884 | 50 | 52.3 | None | | | | None |
| 7PG9 | Transposase | + | 9676 | 10011 | 111 | 61.6 | ACA75650 | | 7 × 10−51 | (90) | pfam05717 |
| 7GP10 | Transposase | − | 10415 | 10035 | 126 | 58.8 | BAB32744 | | 9 × 10−56 | (100) | None |
| 7GP11 | Transcriptional regulator (PtxE) | − | 11392 | 10523 | 289 | 62.5 | ABR80272 | ptxE | 6 × 10−163 | (98) | pfam03466 |
| 7GP12 | PtxD | − | 12396 | 11386 | 336 | 63.5 | AAC71709 | ptxD | 0.0 | (98) | COG1052 |
| 7GP13 | PtxC | − | 13232 | 12405 | 275 | 63.8 | ABR80270 | ptxC | 3 × 10−153 | (99) | COG3639 |
| 7GP14 | PtxB | − | 14104 | 13241 | 287 | 57.1 | AAC71707 | ptxB | 3 × 10−163 | (98) | COG3221 |
| 7GP15 | PtxA | − | 14928 | 14101 | 275 | 62.1 | AAC71706 | ptxA | 7 × 10−154 | (100) | cd03256 |
| 7GP16 | Transposase | + | 15271 | 15912 | 213 | 59.2 | ABR80273 | | 2 × 10−97 | (100) | COG3039 |
| 7GP17 | Reverse transcriptase | + | 16301 | 17569 | 422 | 58.9 | ABP79384 | | 6 × 10−179 | (87) | COG3344 |
| 7GP18 | Hypothetical protein | − | 18474 | 18301 | 57 | 55.2 | None | | | | None |
| 7GP19 | Hypothetical protein | − | 21108 | 19564 | 514 | 57.2 | EDO21782 | | 3 × 10−175 | (59) | smart00044 |
| | | | | | | | | | | | COG2114 |
| 7GP20 | Hypothetical protein | − | 22127 | 21189 | 312 | 55.4 | AAK24667 | | 8 × 10−76 | (47) | cd00038 |
| | | | | | | | | | | | COG4271 |

TABLE 8
Annotation of ORFs in PAGI-8

| | | | | | | | Homolog | | | | |
|---|---|---|---|---|---|---|---|---|---|---|---|
| | | | | | AA | | Access. | Gene | | | Conserved |
| ORF | Annotation result | Orient | Start | Stop | length | GC % | number | name | E-value (% identity) | | domain |
| 8PG1 | Site-specific recombinase | + | 90 | 1211 | 373 | 58.3 | AAO54077 | x | 9 × 10−137 | (70) | cd00796 |
| 8PG2 | Predicted ATPase | + | 1523 | 3601 | 692 | 48.8 | EAY29456 | x | 2 × 10−155 | (40) | None |
| 8PG3 | Hypothetical protein | + | 3953 | 4345 | 130 | 60.6 | ABJ11402 | x | 9 × 10−8 | (30) | None |
| 8PG4 | Hypothetical protein | + | 4488 | 5150 | 220 | 48.9 | ACA70219 | x | 9 × 10−6 | (23) | None |
| 8PG5 | Phage related DNA-bidning protein | + | 5196 | 6371 | 400 | 45.6 | CAG19734 | x | 1 × 10−78 | (38) | cd00093 |
| | | | | | | | | | | | COG2856 |
| 8PG6 | Hypothetical protein | + | 6386 | 6676 | 96 | 48.1 | None | | | | None |
| 8PG7 | Phage integrase | − | 8020 | 6923 | 365 | 52.1 | ABM43726 | x | 2 × 10−29 | (29) | cd01182 |
| 8PG8 | Putative TraY/DotA like protein | − | 10828 | 8573 | 751 | 60.2 | ABF09700 | x | 0.0 | (69) | None |
| 8PG9 | Hypothetical protein | − | 12730 | 12278 | 150 | 46.1 | None | | | | None |
| 8PG10 | Transposase | + | 13279 | 13542 | 87 | 57.2 | AAG04375 | x | 1 × 10−42 | (98) | pfam01527 |
| 8PG11 | Transposase | + | 13575 | 14417 | 280 | 61.6 | EAZ53156 | x | 8 × 10−163 | (99) | pfam00665 |
| 8PG12 | Pentapeptide repeat | − | 16063 | 14444 | 539 | 54.9 | ABO91967 | x | 2 × 10−44 | (29) | COG1357 |

TABLE 9
Annotation of ORFs in PAGI-9 and PAGI-10

| | | | | | AA | | Homolog Access. | Gene | | Conserved |
|---|---|---|---|---|---|---|---|---|---|---|
| ORF | Annotation result | Orient | Start | Stop | length | GC % | number | name | E-value (% identity) | domain |
| 9PG1 | Rhs family protein | − | 7192 | 521 | 2223 | 63.4 | EAZ59968 | x | 0.0 (96) | COG3209 |
| 10PG1 | Rhs family protein | + | 1 | 2457 | 818 | 67.4 | ABJ12620 | x | 0.0 (98) | COG3209 |

TABLE 10
Primers used in screening the fosmid library

| Sub. | | | | SEQ |
|---|---|---|---|---|
| Hyb. | Sequence | Primer | | ID |
| sequence | homology | name | Sequence | NO: |
| 2-3 | Site- | 2-3F | AAATTGGCCGAATACGCTT | 204 |
| | specific | 2-3R | TATTGCTTGCTGAATACCGGG | 205 |
| | recombi- | | | |
| | nase | | | |
| 2-30 | Site- | 2-30F | TCTCCAATCTTGAGTTGGGC | 206 |
| | specific | 2-30R | TTCTATCAACAGACCGGGATG | 207 |
| | recombi- | | | |
| | nase | | | |
| 2-7 | Zinc- | 2-7F | CAGCTGGACAAATTTATCG | 208 |
| | binding | 2-7R | AAATCCTACCCCACGGTGTAA | 209 |
| | transcrip- | | | |
| | tional | | | |
| | regulator | | | |
| 3-18 | Phage- | 3-18F | ACGCAAGTAGGGTCGTGAAAT | 210 |
| | related | 3-18R | TACTTTTTGAACCGTCGAGC | 211 |
| | protein | | | |
| 2-11 | — | 2-11F | ACTTTTTGAACCGTCGAGGTG | 212 |
| | | 2-11R | AACCAGGAGTTAACACGCAAG | 213 |
| 2-27 | — | 2-27F | AGGCGGTAGTCATGCGATG | 214 |
| | | 2-27R | TATCGCGGGGTGAATTTTTC | 215 |
| 3-23 | — | 3-23F | GCAGCCTGGACAAATTTATCG | 216 |
| | | 3-23R | ACCATCGAGATACACCATCCA | 217 |
| 2-13 | — | 2-13F | ATAAAGGATCTGCCCCAACG | 218 |
| | | 2-13R | TTAATCGAGTTGCTGAAGGC | 219 |
| 2-18 | — | 2-18F | CATTTAAAGAGGCGATCGATG | 220 |
| | | 2-18R | AATCCGACCTACTGCCTGAAC | 221 |
| 3-4 | — | 3-4F | TGATGGATCGATTGTATTGGG | 222 |
| | | 3-4R | GCCCTCAAGATCGGTAAAAT | 223 |
| 3-15 | — | 3-15F | ATTGAGAGTGGCAGAGGTTGA | 224 |
| | | 3-15R | ATGGCCCCTCTTTCGGTT | 225 |
| 2-32 | — | 2-32F | CATTTATTCGCTGTGGGACG | 226 |
| | | 2-32R | AATGTTAGGACCTCCTTGCG | 227 |
| 2-47 | — | 2-47F | CAGATGGAAGGAATCTCGGTCA | 228 |
| | | 2-47R | CGGGCAGGTACATAATAACG | 229 |
| 2-33 | — | 2-33F | AGTTTGAACACAGGAAAAGCG | 230 |
| | | 2-33R | GCCTAAAAGGACTACCGTCAG | 231 |
| 3-21 | — | 3-21F | GAACAGCTCGATTCTCATGCT | 232 |
| | | 3-21R | AATCTTGTCCGTTCGCAACA | 233 |
| 3-8 | Rhs | 3-8F | TTCCCAACTGCAGGAGGTAAA | 234 |
| | family | 3-8R | AAAATCAGCCATCACATCCC | 235 |
| | protein | | | |
| 2-2 | _{Φ}CTX DNA | 2-2F | TTGCAGAATCTTACCTGCAGC | 236 |
| | | 2-2R | AAAACACCAGCAGGACTACGA | 237 |
| 2-6 | — | 2-6F | ATGGAGTTCAAATGCATCGG | 238 |
| | | 2-6R | AATAATCTGCCCCCTCTTTCC | 239 |
| 2-41 | — | 2-41F | GCCGCGGGATTATGTTATATG | 240 |
| | | 2-41R | TATAAAGGATCTGCCCCAACG | 241 |
| 2-56 | Rhs | 2-56F | GATATACCCCCTATCTGAGCG | 242 |
| | family | 2-56R | TGTGGAATTGTGAGCGGATA | 243 |
| | protein | | | |
| 2-5 | PAPI-1 | 2-5F | ACTTGTAGACCAGGTGCGG | 244 |
| | | 2-5R | TGGATCATCACTGAGGCAGA | 245 |

TABLE 11
Primers used in screening clinical isolates for
PAGI sequences

| | | | SEQ | |
|---|---|---|---|---|
| Genomic | Primer | | ID | |
| Island | name | Sequence | NO: | RGP |
| PAGI-6 | PAGI6- | CGCGACTATAACCGGGCCAT | 246 | — |
| | 20250F | | | |
| | PAGI6- | CATTGCGCCGAGGATCTGCT | 247 | |
| | 20801R | | | |
| PAGI-7 | PAGI7- | CGGTCGATATTGCACGCCAG | 248 | — |
| | 6236F | | | |
| | PAGI7- | ATCGCTCTGCCTCGCCCATT | 249 | |
| | 6876R | | | |
| PAGI-8 | PAGI8- | TGCTGCTGTCGGGTATTACCTT | 250 | RGP6 |
| | 7050F | | | |
| | PAGI8- | CCCCTAACCGACATCCCTAACA | 251 | |
| | 8100R | | | |
| PAGI-9 | PAGI9- | TCGTAGCGGTAGCGAACGGA | 252 | — |
| | 2892F | | | |
| | PAGI9- | ACCAGCAAGGTCGACGCCAA | 253 | |
| | 3475R | | | |
| PAGI-10 | PAGI10- | GAACGCCTCGAATACGACGTC | 254 | RGP2 |
| | 472F | | | |
| | PAGI10- | TTGTCGCCTACTGCCAGGGT | 255 | |
| | 1292R | | | |
| PAGI-11 | Not | | | RGP5 |
| | screened | | | |

We claim:

1. A method for detecting a virulent strain of Pseudomonas bacteria in a sample, the method comprising detecting at least a fragment of PAGI-5, PAGI-6, PAGI-7, PAGI-8, PAGI-9, PAGI-10, or PAGI-11 nucleic acid in the sample, thereby detecting the virulent strain of Pseudomonas bacteria.

2. The method of claim 1, comprising:
(a) amplifying at least a fragment of PAGI-5, PAGI-6, PAGI-7, PAGI-8, PAGI-9, PAGI-10, or PAGI-11 from the sample to obtain amplified DNA; and
(b) detecting the amplified DNA, thereby detecting the virulent strain of Pseudomonas bacteria.

3. The method of claim 1, wherein the virulent strain of Pseudomonas bacteria is a virulent strain of Pseudomonas aeruginosa.

4. The method of claim 1, wherein the sample is a biological sample from a patient.

5. The method of claim 1, wherein the detected fragment comprises at least about 10 contiguous nucleotides of PAGI-5, PAGI-6, PAGI-7, PAGI-8, PAGI-9, PAGI-10, or PAGI-11.

6. The method of claim 1, wherein the detected fragment comprises at least about 10 contiguous nucleotides of PAGI-5 within novel region I (NR-I) or novel region II (NR-II).

7. The method of claim 1, wherein the detected fragment comprises at least about 10 contiguous nucleotides within an ORF present in PAGI-5, PAGI-6, PAGI-7, PAGI-8, PAGI-9, PAGI-10, or PAGI-11.

8. The method of claim 1, comprising:
(a) isolating nucleic acid from the sample;
(b) contacting the isolated nucleic with an oligonucleotide that specifically hybridizes to nucleic acid of PAGI-5, PAGI-6, PAGI-7, PAGI-8, PAGI-9, PAGI-10, or PAGI-11; and
(c) detecting hybridization of the oligonucleotide to the isolated nucleic acid, thereby detecting the virulent strain of Pseudomonas bacteria.

9. The method of claim 8, wherein the oligonucleotide comprises a label and detecting hybridization of the oligonucleotide to the isolated nucleic acid comprises detecting a signal from the label.

10. The method of claim 8, comprising contacting the isolated nucleic with a pair of oligonucleotides that function as primers and wherein detecting hybridization of the oligonucleotide to the isolated nucleic acid comprises amplifying at least a portion of the isolated nucleic acid.

11. The method of claim 8, further comprising amplifying at least a portion of the isolated nucleic acid.

12. The method of claim 1, further comprising detecting at least a fragment of PAPI-1 or PAPI-2 nucleic acid in the sample, thereby detecting the virulent strain of Pseudomonas bacteria.

13. The method of claim 12, wherein the detected PAPI-1 or PAPI-2 nucleic acid in the sample comprises exoU nucleic acid.

14. The method of claim 1, wherein the virulent strain of Pseudomonas bacteria has an LD50 in mice that is no more than about 1.3×10⁶ CFU.

15. A method for detecting a virulent strain of Pseudomonas bacteria in a sample, the method comprising:
(a) reacting the sample with an antibody that binds specifically to a polypeptide encoded by an ORF present in PAGI-5, PAGI-6, PAGI-7, PAGI-8, PAGI-9, PAGI-10, or PAGI-11; and
(b) detecting binding of the antibody to the polypeptide, thereby detecting the virulent strain of Pseudomonas bacteria in the sample.

16. The method of claim 15, wherein the virulent strain of Pseudomonas bacteria is a virulent strain of Pseudomonas aeruginosa.

17. The method of claim 15, wherein the sample is a biological sample from a patient.

18. The method of claim 15, wherein the detected polypeptide is encoded by an ORF present in PAGI-5 within novel region I (NR-I) or novel region II (NR-II).

19. The method of claim 15, wherein the antibody comprises a label and detecting binding of the antibody to the polypeptide comprises detecting a signal from the label.

20. The method of claim 15, further comprising reacting the sample with an antibody that binds specifically to a polypeptide encoded by an ORF present in PAPI-1 or PAPI-2.

21. The method of claim 15, wherein the virulent strain of Pseudomonas bacteria has an LD50 in mice that is no more than about 1.3×10⁶ CFU.

The application's sequence listing, which the Patent Office published only in electronic form, follows.

SEQUENCE LISTING (271 sequences)

SEQ ID NO: 1 - DNA, 99276 bp, Pseudomonas aeruginosa
ggggggggggtactgcggtgttggccttgaaatggcgcggctctgccagcattggaatccaggcgctctcggtatttccagatgtttcctacaggcctagcgatctgctgggaggcgcagctacctttcgtccggtagccggcccctcagtatcggtatcgctaggcgggactgcttcgggcggtagatccccatccaccagatccgcttgttgcggtggaagccgcggaggccgtggcggcacggttcgataggtgttgagccatcagagtgaacagcactctttgctcgaaggtgtcaggtggctgtggtagcgcttcttcccacgcggttgcatctccctgaatgcctgtccctggtgtgtgctcccttggttctgcaggttctgtcctagcctcctgtggcggcgcttcacccattcgagcgagaggttgcccgcatggcttcggtttggcagaggcttgcggggagccgctgtaatccaccttcctgacgttctccagcgctccttgggccaggcttctggcatgcagcacggcacgcatgtggtcgtagtcggcctcgatgtagctcatcgtggtctggatattcgagtggttgagcaggcacttcgtgaggtggatgttccgctcgggtgccttcatcaagtcggtggccagggtgtgccggaaacggtgcggggtcatccgcaccgcaaccttctcggtcaacttccggtacatggcttcgacctggtcggagttcatcaccttgctcttgtagtgcggtgagaaccggttgacgttgaacaactggtcgtcatcggcgaatccggctctatcggcctcctgcaggagccgcgataggtgaggcacaagcccctccgttattggcactacgaactctttatgagttttctctgtctcgccgcggatgaggatcagttgattatcccagtcgatgtcgcgcttgcggatgcacagcagcgcgttcaaccggatgccggtgtagtagaagacctcaaacgtgcaaagccagaaccaggcgggagtgatgcgtgcgcgatcgccggtgcagcgctcggcgccgacctgcatgttgagccaactgcgggcgcgcaggatggcttcggctgcgacggttttgcttgctcgcctgggggggatgacggtggtctttctgaacgggttgacttgggagtgcgtcaccagctcgtgctcgatggcatagccccagatcgttcgcagatgattcgagtacgtgttccagctccgcttcgataggccttgttccagtaccttgcgccgccaacccaggacagcccggtggtccacgtcatgtacggttgccgtaggaccgaagtgcttgagcagcgccttggtcgcggcgcggtagatcttcgcgctggcttcccggagatcgtgcgcgaagatgtactcctcggtgagctgctgcggcgtcattccacacctccttcggcatcggtgataaccgtgaggcttgggttgtccagaggctgctcagggaacagcaatttgggatcctggagtaggtaggccttgagctctttcgttttacgagggcctgagactttgatggtccagatgttcaggctcttactggtcttccggtgaagcccttgtttctcgaacgcgcgctgcaccagcttccagccggtcgtctccttggcctgggccagcttttcgagctctggatgctcctggacataacgcttgaagattcctggcgtgaccagcatggcggtcccgtcgacggtatgcaccaaagccttggtgtcgttgatgaacaggcgacgggccgcgatgccagatttcatccagccaacgaatccctgtcccagatcagtgcttctgctaggcataaatacatcttcaactgcttcaggagcgcaatctgttggctccttggtccctagtggctgctgtaggttctcctccccgcgagtgttcgtagaagaagcagccggtgagtcgtggctagtgtctagctcttctggtggcgaattgatattaccaagaagcgcgtacaaatcgtctgtttcttcctgatcctcagctgagggcttcgcaatcgcccgcatctcgtttgacggtttcgcaacgctcggcgtaggttggcggagcgtcatcttggcttctggcgcctgtcgctgttcaatcggatcgttggggatttcgcaggtcgtttccggcttttcaggggaggcgttgccctcttcaattacgagtgatccgctgtaggaatcaggccgctccgcagggtcagcccaaatcaaggctggagcgatcttgaggagcgtgaacttgtttctccacccagcaccattgtctatcgtggccgtccagatggccttgtcttcggcgttcgtctggatgacggcctggtcctggagcatgttgaagaatggcgcgttggaggaggggaccccttcgattccctgagccagcaggtaggctctcaactgatcggccgcgggcttgctcaccagccagagtgcgtcctgagtcagccacccgtcggacgggccgcccggctgattcagcttgaatttgtccttcaccaggaagcgcagcccgtctgccaactgccgctgcagcgactgcttcggtgcagccagcgctcgatccggattccctcccaactcctgcgcgacggaggcttggtctgccttcacgatgatctctccgaggatcccggcgtgctcgtactgccccgcgaacaggtagatcaattgagcccacagctctggaaagcgactgagccagtcgagtgcagtgcgcggaagcagttggtggatgagtagcgctgatgcagcgccgtggagctggtattcgcgggacttcacgtacttgaagcggtagggctggttgatcggtccgttccaagggtgccaggtgctgccgtcctgcagctcaacctgcaggtcgacgacgatcttgcctatgtcatgtgccagggcaccataagccgcggcggccgaccaggcttcagcctgggctgactgtgactctggtgccgcgcccacagggagcaggtaagtctgccgcaccttcagtgcgtaggccacgatctccaggccgtgatcgatcatcccgcctggatgggcatggtgatggttttccgaagcagggagctgctggaccagctcggcgtagttggccagtggtcggcggtagatctcctcgaattgctgcttggatagcgaggcacgttgccagatgttctccagtagctgccggcgccgaggcgtgccgagcagttccatgctgctcagaggagggaggaatccccctggggcagctttggttggtggggtgggggacggcttcctggatatccaggaaaggagttgaaacatgggaggctccatgacgattcatggagcgggcttttccgccagatcaggggctggcaacaacgataaaacaacggtggcgggcaaggggtattttgttggcaatgtgccatcttcgagcagggcctcccatcgctatcgatcactggactatcagcgcgtacgatcgagtgcgtccgacatcgagagagcggtagcttttttaggatcgttgtctcccgttccaaccagttgatccgggcctccatctcctagatcttctgctgttcggggggaggcttgtttttcgggggcccgccatcgcgctcctgctgtatctgctttacccaacggcgcaaggccgaatccaccgctcccagcgaacggcaggcgccgatatgtcttggtctagcaccaaggctccggcctctggcttaatctccgcggaaaacgtacgtcgttgcttgctcatcagacacccctctctcggcgatgatctcgcctaaatcggcctcggggcagtaacactacaatctaccgcgttataccttgcgaaatacgaccaagctttctgctagttcttgctttccgccttgctgcgcggatgatctcattgagcgaaacgcctcaacgtgtactgcttcaaatccacaggtgggcgcgagctcggtcaggatctctgctacggggatgtgaatgttcgcataaagactgtcccctacaaccgcccatgcttcaccttgaagaggcaaacggttggccaaagacttcatcacgccggccatgtccgcaaaatagccgtcgaccatgttgggaatccagcgactccaaagcagctcacgactggcatgcagtttcttcgaaacgtcatccaacgttgctgatccaagtgggcgcggtgcgtagttgcgttgaatctgaacgtgggacgccaatgtcgactgacgcagtgaacgattatcagcggagtcgttcaggtagcccagcacccacagctcaacgttgtatacgtcggtatagtcgaacgagttggggtaggggggcgaaaataccgcgagatctgccataggcgcattcgcgatcgtttcgcggcagtcgccccggatgagtgtgtacttcgacacggggcgagacgcataacgggcaatttcgtaaagcgctttttgaaccctgttcagaaattgttgatccaccgtctcagggctctgtttccttaactgccaattttgcctgtatcgacgtcctttgccactgatgagcacgttacttacttcaaccagaaagccaccaaggatcgctctgaagaacatctgatggatgggattggataggctggcaatagccttacggtaggactcgattctttgcgcgacgtcatgttcgaacagccaacgattattgactcccggagctacaaatgtggttggaagccagctcaggtcgtggtcgcctcgtatgctgcgcaccgcacgaatgatctgacccaagtcatgagtcagggacgtgctgtcataggcggtgagtttcgcttcaatgagatcagccagatagggattgacctccatggtaacaggctcaacccctagaaactggcaggccaaagccgttgttcccgagcctccaaaagggtcgatacaggtgcggacaggaaggagactttccctgaccgctcgggcgacgagttctggcgcgaatgcctccttgaaatgccgccaagtctgaaagggcagtttctctgcgcccgcattcgtccctaacgtattgattttgcggcctttagtccattggtcaaatgcgatctgcatcgctgcctccttctcatctcaaacgaattgccacagttgaaattctggtgctaaatatacgcttattttcaaaaaatatacgtatatttgtatgatccgcaaagacgctgcgcaagacgttgggcgcttgctcgccgagtttttcaaacgaaagggcttgacacaggcgcaggtggcagagtgctatggcgtttcgcaaagttgggttggacgtgtgtacaaaggagagttcggagtacgtgctcaatctgttcagaaaatgtgcaacgacgccagtgtttcattcctgactgagcttccagagcaggaccaagccacctcatcaaccaggcttcgtcttactcgcctcttggacagtgtctgggagggaacagaagaagatgcgaaggtccttactcaagcactgctggcaatcaagatgctacgccgcagctgacagttaaggtttcgcttgagcagcatgtatatagggagataaatgtgcgttctagcatcagccttccagttattgagcggttggtaatccggaacttctcactctaccctggtgagcatggcaatggactggacattgcattcgaaaatggcatcagtgtgattgcaggtatcaatggtattggcaaaaccacattgctaaccctattgttaaggttattgctcgggccgagtaacccggaaaaggcgaccaagaatgtggggcgggtaagccagcgacgcttggttgagccaaagaagtttgacttcttctcaagccgggttcctgaaaaactggacgatgatgcctacgccactttgtatttcagcgtggggcagaggaaagtggaggtctcgcgatacatgcgagatatgcgtataaagggagtgaaggtttccggacgcaagtatacaccagcaggtgagacggcatttattgaagagctggcctccatgagtggactactatcagcgtacgactttcacatggtagtcagatatcttcagtttttcggtgaggaccgtttgccgttgctatgggagccgtcggctcagtttgaattctttaagatactattctttgacgagtcagtggccgaaacgttaaataagctttttgcacttattcaaaaaatcgactctgagtatcgcaatagaacaaatattctaaatcgcagaaaagatactctaccttctctagaacgtccagccttgtccattgaggttcaaacatctcaaggtcagctcaaagaggcgaaggcggccgccgccgaggccgaggttgagtacatcaatttaaagcaagaatttgacatgttgcagcgcgaagagaatcagctgctgctccagaccgatgatgggcaaataaaacttgctgaacttgaggctcaattcttgcaggccgactccaaatttattcttcaggctttaccctcgcttggagataaggagcgttttttaatgcagggctatgctacgggctgcggttgtttcatttgtggagcaaagtcaaaaaaacagctgtctggtatcagcaagaaaatccgtaaaggacattgcttcgtctgtgactctcagaccccagcatcgaacccgcccagcatcacccccataaatgtaaacgatatccatagaatcgaggcggatcttgactcgattcgacgacacctagctgcgaacgacgcaaagcttgctgaaattgaggagcataaagctagaatcgcaccgctattaagatccgcagcgaccaagcgtgcccttacgctgcaagcagttgagaccttggatatgttgcgccctgtcgatgaaggacaggagatgtatgacgtctactcagagattgaccgagagcaagctgagttggacgtactagctgaaaatcgcaaacgctacacatcggagtatcgggcagccgtcgataatgcacaggaggaaatgtcaactttgaaggctgacctcgaaactcgtctgacgaactacgccatggagtttctgcaggagcgcgtgagtgttgccttcaatcgccagacgccgttcaagatcgccactggtgcagatcgagtcaatattcctgccttcaccgtcaagatgacttccggcacccataagctgccaagcgagcgatcaagcagcagtagcgtttctgaatcccaaaaagagtttctcgacctcgcgtttcgcatgacgttgctcgatatgatcaacactaatggccagaaaatgctggtgattgagacacccgaagcgagtctggatagctggttcatgcgtcgagcggcggatctaatgcgtagttttgcccctgaagattcaacggcaccgagaaaggtaatagcgacctcaaatctcaatggcacggaaatgattcctgccctgttaggactgatcgacgcaaaaggcaaaatatcgaagctacagagccatcgatccaaccactttataaacctacttgaactgactccttcgcccgcagcgctctccgaaggtagagcggttcaactgctgcatgaagagcttgggaggttcttgaatgctaagtgataaggcgctccttaagcgtgattacgaaaagctacagtttgtaaggtgggttcttttcttaatcacggcggcagaatctgctgggttgaactcattaagccgagctagactgcatgcgctattgtttatgtcctttgcttccgctcggttttatgggttacaaccgttgcgccagcgtgcgcaacgaactccgcatggtccttattatcgggcagcccacttggccttagggcatttagtatttgccgatcttgtctccgtttctggatttaaggctcatccgtcgcctaaggatctacaatttgacggggtgttcaagcttaaaaagaatggcttgcaggtctgcaaggttcttcgtcaaactgatatgggtaggagaatttatagtttcctgcttgatatctgtcttggcgcggtacaatcgctcgaggcggaaggtatcccggaggagcaggaaggacagtcgctggatcggatgctggttcaggacctgacgtatgtatccgccttgagacggccaggtgaaatgcttctgatcgaagaggatgggagcgaaaacacgccgaccgtcgagggacttagaaaaatacaatctatactcggtcacaagacttttatcaataggaaagatgttctgagtgcctatcagtcgatcctgcgagctcgagcagaggtggcatgaatgactattgaacccaccttcacgtattctgagaaaagccacattgagaggcttcgccctggaaactccggcagctcggaagatcaattcatccaagaagttatcgacttttatcgctattggcagagcaagcgttctcttggcgactatggaagcacggaacaggcgctcttgatgatttttgcggaaacgccggacgtcgatttgggacttaaagactatgtcccaacaacgatctcacgcataagaagacgttcgggtacggtaagtcagggcatagccgtttgcaaccagaactttcgcctgatggtaagactgctcgacgcactaactgttgacgaggcgtatgacttcatcgagcaccacctcggcgatcaacacacttttgtgattgccaagttcggccagcagactatccaaatccatcgtgcaggccagccgttggatgactggattcatgagccggatgaaattttgatcaagagcaccgatgagaatattacgcctgacagtttggcggaggatctacgcgtcttccatcatgaatggctcagtactccacgtgcgattggtgcgcggaccatgtgggagctgaacaaaacaaagacgcagtacgacttgcgcagtggaccagagcgtagtgttcagtcgtacttgttgacttacttgagggcttcctaccgaaggtcaggagtgtttgttaatgaggagataaacaatcagggggggagaacggacctgtatgtgcagcgagaaacaagtccagggtcgaacaaacagataaacacagtcatagagcttaaggtgctatcacctaagaagtctttcgagcgaaatcttgagtgggccaaggaaggaatcactcaggctaaaggctatgcaaatgcgaataccgatgcggcttttgcatgtttatacgatgcgcgacgcaataagcttgctatgccagagcttccggcctttgcgttggctaactccgtaaggcttgagcactatgagatggaggtgcctctaccgccgccaaagaagaaacctgctaagatggcaaaagcatagacgatgtctgtccagaaataggtcaggacttccaagacttcaaggttgcgcgatacggtctacttattcttcatgctaggtagggggggaggcgatacgataccacgcaataacagcactaaattagtaatccagctgttgtgccttgtagtggtcaactcatcctagacagtgggttgaccactacatgcctctcttagtatggcacttctattattctcgatctcaagcgttcagatcgtcatatgatgaactgaacgtggtgtcaggccgtagccttttcgtgttcgccggcgcgaacgcagccatttctgccttctggcaggccctttcgggtagggcttttacccttgtgaaccattcccttcgcccttcaagcccatttcccctttgggccatttgctcctgctacagctgctcatcgttggggcaggtgttgatccagatccatggagtcgtgaagcacgcgaaccacctcgagcacctggtctgtcgccacccggtagaagacgaagtgcctgggccgaacaaccttaccgacattgggcatcgagcggcagtaaacgaggtggatgctgcgcaggcctgctcccagttcttcacggctgatgctgcctacctgttgtgggtctgtcgcaactgcttccagcgccgcccctatgagtgcctggtaacgtcggcgcgcggcatcgccgaagcggttgtgggtgaagcgcaggatatcgacgatgtccgcttgggcatcatgggagatgcggtacttggccatgcttcagtggctcgcctggttgccgagctcgtcgaggtattgggccaggtcgtcgctggtgatctcgtcgtactcgccgcgttccagttgcatcagtccactggatgttgcgttgcggagggcttcgagcttggcgctattctgggcttcctgttgcagcagcaggcgcaagcctgcccggatgacttcgctgcgattctgatagcggccggtctccaccagctcgttgatatcctgctccagcggatcgggaaggacgacgtttcgagttgccatgaggtgctccagtcggcagatagctagtggcataatatgccataaggcttgctagatcatcttttttggcgtataggtgatggcaggatgcctccctttgggagccaggagattgtgacctgctccccgatttcagtaccacgccgaacttagtagagtccgttttccgagcaggagacggcagtgaaaaagcgttttaccgaagagcagattctcgacttcctcaagcaggcggaggccggtgtgccggtgaaggaactgtgtcgccgacacggcttcagtgatgcctcgttctacacctggcgggccaagtttggcggtatgaccgtggcggacgccaaacggttgaaggatcttgaactggaaaacagccgattgaagaagttgctcgccgaggcccacctcgacatcgagtcgctgaaagtggtcgcccggggaaaagggtaagcccgacagcacggcgggaggcggtgcaggagatgcaggcgcgaaccggcatctccgagcgtcgtgcctgtcagttgatcgggctgtcccgctcggtgttgcgctaccagccgcgagccagtgtgcaaaacaccgagctgcaagcccaactggtggaactggcccaagagcgccggcgctttggctatcgccgcctgcacatcctgctgcggcgtgctggcgtgctggcgtgcaggtcaaccacaagcggatctatcgcctgtaccgcgctgccggcttgatggtgaaacggcggcgccgccgccatggcgtcgcggtggagcgcgaacgtctgagtttgccgagcgcaccaaaccaggtctggtcgatggacttcgtcttcgatgcactgagcaccgggcggcggatcaaatgcctgacggtggtcgatgacttcaccaaggagtcggtcggcatcctggtggagcacggtatcagcggctttcgtgtcacacgggcgctggacgagatggcgcggtttcgcggctacccgaaagcgatccgcaccgaccaggggcccgagttcaccggcaaggcactcgatcaatgggcctatcagcgcgacatcaagctgaagctgattcagcctggtaagcccacgcagaatgccttcatcgagtcgttcaacggtaagttccgggacgaatgcctcaatgagcactggttctgttcgctggccgaagcgagaatccgcatcgcggcctggcggcgggattacaacgaacaccgaccgcacagcgcgattggcaatctcaccccggcagaatttgctgcaagttggcgaactcgccagcagcagctgaagcaggaaaaattaatatcaaccccagggcctactaactaggcagcggtactaaaactgggggcaggtcaattgataatggaagcacacgcttacaaaggtttcgcctctcggatcggatttggtctgggtacgtttgtgtgcttctgcctgcatgatcgtcggcctgtcgtgcgctggatcaaacgagcctgcctggtcgtggtgctgttcgttatccttgttcagaactttacctggcttgccagcgccttcatgaccttattgtcgtttgggttgattgggtgggtgttggttaaaggtgacttttcgatcttccaacagttggaaaaagatgaagcccaagcagctccatatggccgagatgttttcggtaatgagttggattggatggggcgacgagatgatggagttctttctcgtgaagactagtaaaaaaggggccttttagcccctttctgtcaatcccctttgggggagaacgacgatattgcctgcttagctacgctaccaccctgtactcctgcctgttggacccctttgaccccgttactgagatcgctgaggagagctccaacttggacgcctgcccagcctatagcagttatccacagcatgggtaaaataacgaacatcgcccccatcacaaagttcaatattgcatcttgagtcgccgtattcagtcccatgaccgggtcgaacgaaagatgcggtgatcccgaaccatagaaggcatcaagtatcgtgctgtctatatatctagctaactgaaaccagaagtcgacgaacatcatcgcaaagaagacgaccgtcatcgtcatggcaaccttcagttgataggtgccgatgaccaggaccatcggaatgcagatgaccatggccatcttcaggaacgacatcaccatcggcagtgcctggcggaccatgtccatcgccgggaagtaggccagactgcccagggccacaccgaaggttccagcggttctcgcgatgccgttccagaccgtaccgcccacctgcccaccatagtcggtatagacgttgcctttgacctggctggacggtgaaatcacctggcggatgactgcctcggtcacctcgtcctggtccagccatttcgcccatttgaggaagctggtcatcaggtccggatccacctggcccttgatccgatcacgcaagccgatccctgagtcagcccaccactgcttgcaggttgggtagccaccaccaccgcccacctggggcagcccggcgtcgcgggtggcgttgtagggccacgactgacggggactcttcgagtagtcggtgtcgtagtaccccggggtgttcaacaggaatcgggagccgatccagttcaggtcctgcagcgccttgttgtcctcgccgacggagcccagatcgggttgccgcatgaacagccgcgcacgggaaggtccgtagcagtccctggaaaagtcagcgatttcttgtgccagcagcgggttgttcacgcgcgtattgtccacttccattcgcatctgccgcagatccgtgccgcacggaatggccgcgaccgcgccggcggtgaagcccttggacagggcgtgcatcatcgcccaccagagcggcatctgcgcactcttgccggccaggctgctgaaggaggtcgaccagccggtgtctgccggcgctggcaggttgtactggcactgctgggcgcgggcctggtcgaactcgatggtgtcgaagctcacgttgacgaccgggattcccgccagggcgaccacgatgtagccgacgtagatatgcgtctcgatgcgggccagagacagcacgcctttgttgccctcgtcggcgccttccccgcgaactttcagccactcacgcatcacaatggccacgaagggcaccgcgaacagccctgtatccgagatcatgttccagatcccgttgttgatgatccaaccgaggagggtgaggtaatactccaggtagtcattggtcatgaaggtcatgctgcgcctcccgtgcggaagtaggctttgctgaattcgatgagcaggatcagcaacagcaccaggatctcgatccgccgaatgcgctgccgctcatgcgcgctcagctccttgcgctgcttgagccggaaccaggcgatggccagggcgcagtacagcagcgcccgccaggcgaacaaactccagtagttgctttgccgccaggcctccaggccctggatgccgccgaagtggttcagggcgaagaggctgagcagcgtaccgaccactgccagaccgacgacgatcatcactccgaccagtagctggccgaggagctttcggctggtgagcgtatctgccatcacggtctccctcccgaccccgacttgccgccggcggcagagggggcctgcaggcgatcaaggcgatcagcatcgggcgccgactcgaacacgccgctggaccctgaggcgcgctgttgcccgcgctcgatgacccgcatgggcgaattgctggccaactcgcgacggagttccagttcggtcttgaggttcgagatctcctgctgcaggaggctggtctgctgatcgacggcttgggtggccaggccgttggcggcgacgttgggctccttggcgccggcgaacatcaggcgctgtaacaacagggccttgctgagcacgtccatcagggagacatcggacgccaggcggcgcgccaggacgtcctggtcacgctcgtcgcgcagcgcctcgatgacgccgcgggtgattggcagcgcatcggtgccggccgcagccaggttctcggcggtcagtggcttacttttcgatagcagctcctgcagcgactggagcttcttgtcgtaggtctcttggatcagcggggtcaggccgacgcctgcagccgtcaccgtcttctggcagccttcacaggtctgctgctgttgctcccccagtacccgggtggcgaatgcagcggcttcttggggggaggaccaggtgttgcagaccaggccgttgttacaactggcggaaggcacgctcgatgagtctttcaccgagcggctggtcaacaggttgtagcccgcccgggtcacgtcgttgacgatgcgaatgggcttctggccggagccgccggccttgtctccaccgacccaggttacgccatcgttgccgcccttcttctccactacttcgagggcggatacggcgtctttcccgccagaggccagcgtggcgcccagggcctggccttcggcgattttcccccagccggtctgctccccagcgatgtcagccatcttctcggcgatcgctctgcaagtccctttcgagcggtagtagtcgatccgcgcctgcaggatgccattggtgatcaggttgtagagctgagggttcgcgcgctggatgatcaacgccggtagcgacatgaccgcgccggtcgcgttctggatgactgagcccatgatgttctggaagccctgtgtggcaccgttgagctggttctccagggtggtgctcaggttcatgtttccgcacatcaggtcgttgttccagccgaaaccgacgccgatcgagtccatctggccggcgctgcccatgctcaccgcactgccgccgccaatgctgtataggacctcgtcgctgagcaccgtgccggtcttggacacgttgattgggtcgtcggcctgggcaagttgcgctgcgagcagccacgtcagcgcgaccgaggtgatgttcattcgcatgattcgtctccgtgtccttattggaagtcggtactgccgaggaagatctgccccttgcgctggcagcaggagtagggacgccagagcgcccaggcgtaatcgccgtcgacggcttgcgtcttcggccctgagttgggaaacaccgcgcagttgaggctcagggacggggtcagctcctgccatttcccggtcgaggcatcgccctctttcagctcgcccgccggccagtagccgtccttgggtgctgcgcgcatggggaggtagacgtggagctggccgattcgcgtggtgatgtcgccggcgcgctgggcgatgacggccgccgtcttgtagtcgtcggtctggtgcaggaatccgctgcgcggatagaggttcccccacatgtcgccggagaagattccacccacctcgcgcagccctgggaccaacgcttcggggtacacctgctcgggaatgccatgccgccagccaatggcgtccagtgtgctgaggaagtacggcaccagcgggaaggtggcgccagggcaaacgtacccagaggcgctggcgaaccggctgaacgtggccccgccaggatggccgatcacatccgcttccttgaagcggccgatgctgttctcggccttgtagttggtggtcgcgtcattgccggcctgggcgaggggattcggtgtgcccagcgccgacacctcggtccaggggttgctcccggtattcgcatagctggagacgactgcgtcaggcacgtagtggcggaccttgaccgacgtcttcaccttgcagccatgcgggccgcagagcagccagtagcagatcccgacgaccttgtattcgaggcactgaggggaaagggtggaggagacgatggcggcgctgttgatcgcggccgcggccgtgaacgagaggctgaaggtggcggccgccgctgccaggcggcggaggttgaggctggtcatcagcgcgtcctcctggccttggcgatcagctcaagagcgcgcggtacgtccggttcgccgtagaccacgtactgcctgtcgactaccacggcagggatcttctcgacaccgagactccacgcatcggtgacgtcttgttgtgccttcaccagctctgcctgcaggcgtcgcccctcggggctctgtagcaactgctgaaacgctacctgagcttgttgaggatccttgggcagagcgtcagtcagttgctcctcaaggtgttgctgggcatccaggagcaggactcgcgatgatccggtggcggtgaccggatgggcctggtcagtgatgacccaggtttcggcctggcttgcgccggtcagcagtacaagtagtaagccaacggccagggggcgtggccaccaggctgggggggaacgatgaagaggcatgggtctgtaccggttcgaataggtacaggtaggagacaggatcgcttccgatagggcagcaggaaatcatcactacgtcgccggggtattttttaccgctgtaatggcgaattgttggcgcatggtgcagaggagggagcctggtaactcataaggtagaagtgagcttccaagccatctttttttcaggtatttgcgcggactgagcagtcgctgtcgaaacagtcatttttgttgctaagaggcaggaaggctgcgctgagattcatactagtaaattagatagttgttgtcttctgaaacagaattgaagcgaaattgggggtaggtttttctaggtgaagggtaactcttgagaattacaaaggtgtgacgcaaatgttgtatttttcttgcggtatgaagatgggtggttggggcggatataggtgcttttctctattttctttaattgctctcatctatgggtgtgtcggtggtggaggtggggcggatgagattgggcagcactgctttgagagagagcagaagatttccggagttaatgataatgaagaggggagtgtgaggttgaatcggctgaactgcgatccaattgaggggcgtgttcttgaatcagagaagctgatacgaaagccgcccaatgaactgggtattcactgaataaataatttttagcatggagaggtcttttgaaatgaaaaaattactttttatgtcgactgtgcttttggtggctagcaatttcgcatgtgctgatgagggctcaaatgatggaagtgagatatgtcgggcgcagggtggggttgaaataacaagtctaggggaagtctcaaagggtgtgaatgttgaagatgttgtagtttgttcgattcttccaactaatatgaagtcgagtcaaagggcgcctacactccctcctctgcaaaggatgatcatttcggcaatgccttcaccaggaacggtcactgtttctgccagcggagataggaagtttacaacatcttgccgggcaaatctttatgctccacgttatgccaatttatatccagacggtgttagcaggggaacatcagatctacgatgtgttggttacaatacacccgggaattcatctcaagggtgtaatgtgtcatgggtcggcccgaccgacattcaattgggtgttgagccatatggcggatctgttgttgtaaactacagttgcactgcctttaaaacaacgattccagtgataatgagctacagttatcgtgatggacgggcagtgtatggtgaggtccagaatgtgtcaggaataataaatgtggttttgaactaaggatgcgcttataggcttttatttcaaggtaatcagcttgtgaatgtgctgcagggcactctattgagcgccctgcataggctggaagtcgtttggctgagggctagtctttcgagttcgatatggcacgttgatgaaggctggtaaaaagtcctgtctgtgtgggtggcaggcgagtggcgcgttcagacgctaatgtggagtttaaggtagggttccgacgccgaggatcctctttggggggagtcatttgctgagccatgcagttgtaagacaggctacgcgctccattgacttggacatcgatacacgaagatttagattgttcattcgagtgtgactctgcgggcggggaggcagcagcctgctgtgtcaaaccaactataggcaataagaatataactcgaagaattttaataaacattccaatctccttaatcctgagggttggatgagattcaatagtaacctcaagttatgaggaaagatgaaccgtctatcgttttgtagtcttggttaggtcaggcacgcgctagtgagtagtaccaagagtaagccgatagccagggggtgtggcggcccatttggggaagcgatgaagaggtgcgggtttgtacccggttcgaggaaggtatagacagcagacaggatcgcttgcgatggggcagcaggaaaccatcagcccgtcggcagtgtatttttcgagccgtatccagagctgctgccaacagcggcaggggtgactccatcgtcatctggagggcatacttagcggttgatagatggctagttgatattaacgtgggagtcgacatcatggagcgcttgctcgagagcatctatatcaatgcccggccggcgatggagttcaagctcagcctcaccagctccggccgcaagaagattgtaaagatcgtggacggggatgaggttgagatgctgccaggtgacgtgcagagcattctggagtcccaaaaaatggatgttggcatcctctccgatttcttcgtccagacgctcctagagcgacgctagtggtccctggccaaccagtcgatcgccgacagcaacgtggtctcgtcggccatgccctccagcttcacgcttcttcccgtctggttgtcccggatgaccagggtcggggtcgctgtaatgccgttcgaccgtgcagtgtcgatgtccgtcttaatcaaccggtccaccaggtccatgtctttcgcacatttttccagtcgagcctggtccagttcaggaaagtgcaatgtgccgccaggcagcccgcccccgttgccggccgactgagcgaagatcgcatcgatagcgctccagaaggctttggcgccgccttggatccccgcgcactccaccaggcgagcctgatggcgggccgcctcgccatgcatctgcaggggaagatgccgccaaaccaggttcacgtccggatggctgtctacccagcgcttcagccgcggtgtgtagaccttgcagaaggggcactccaggtcggcgtattcattgatcgtccagcgcgccttcgcatcgccgtagaggctgtggttggctggtagacccttcaccagaagctcgacccctagggcggagacagccagcaagaccagcagcagccccgcccagggcagggcgggaccttgaaatcgtttcgctgcccagccgcccttcaacagtctcacgcttgcctccgctgtaggacttccgcacggtccacggcctcgatgagcgcctgttgggccgtatcaggctgtggatgctgttgcagccattcatccaggagctgctttatctgcgggactatgtcccggcgatcgaccgccctcagttgaatctgctgcagctcctcgatcagtacaggagcgcatatcctgagcgtctgcagggcatcttcttcggggttctgcaggatctgggtcaggttgtcgatcaggttctgggtcagcgaattcagagctctcattcgtcctggcactccactgccggttggtctgggaaattaattgggaagggcggcaggccgcgcgccttgtcgagatccgctgcgacctgcaaggccgcctcgagctcgtcgcagccggtggcttgcatgatgttgtagcgctggttcttttcttcgttttcggtcatggccagggccaggtagagactcgggggaaccacacggaagaggtactccttgcccttggccaggagcacgccctcggtgaatttgccgctttccttgcgggccgagagcatcatcgacttctgcgccggcgacagctcgcggaacctggagatcttctctacctcgtctgggggcatgttcaggcacaaccaccactcgatcatgttcagcatcggcgccccggaggctgggatgtcgtcgatgttctgggtggcgagccagaaccaggcgcccagtttccgccacatcttggtgatcttcatggcgtagggcagcagcagcgggtgcttggtgatgatgtgtccctcatcggtgatcttgacgatgggccggcccttgaattggtcgcgttcggcgatgttgtttacggtgttcagcagcgagatgtaggcgatcccgagctgggcggcgtagccttcgcgcgcgtaagtcgcgaaatccaccacggtgaggtcggcttcaggccagggcgtgcctttgcgattgaacatctcgccgtcggcgcccatgcagaacatctgcatggcttccgccatttcggccaggcgcgcgcgccgttctggcgcggagccatcgctcctggaggcctcgtagagcgcatcgcgcacgtcctgggtgagcaccgtgcggttcgcggcggcgcaggtcctggccgccgccagaatcgcctggcggatggcgctgcgatcggcacgggtcaggcgcgcgtcttccttctcttcgccgccggtgatcatcaggcgcgcgacgatctccatctcgccgaggatgtctcgttgatcgtcctcgaggtcggccttgctgccctggaccgagtccgaggcctcgatgtcttcggcatccaggaccttcacctggtcgggactctcgaccagcttgatggcgtccgcgaacggcgccaggctgacgccggagcccggggcgaggcggacacggtggaccgagaggccaaaccgcttggcgaagtcggccagcaggccgaagctgttgcccgcttccgcgacgaacatccgtggcaggtacatggcgagcatctggctgatgaggttggtcagggacgctgacttgccggacccggttgggccgaagatgaagccgtgggcattcatctgccggtccagcttgttgaacgggtcgaaggtcaacggcgcgccgccacggttgaacagcgtgaagccggggtgtccggtaccggtggtgcgcccccagatgggcgacaggttggcgatgtgctgcgcgaacatcatctgggtgtaccactccagggctcgcttttcgttcggatcgaaattgcagggcagccagcgcaggtagctgttcagcggtcccacttcgttctgcggttcgaccggcaccaggccggcgccgagcagcacgttgctcagggtgatgcagcgctcctccaactgggtatggtcgcggccgcgcacgaacagagcgatcgaaccgcgatagagcttgtgctcccggccgatcaggcggcgaacggtggccacgtcctcgcgggtgtggatcgaggcctggttgtcaccaacggcctttttcgagagctgctgcagatgcccttccagcatgtcctgcggcgtcaccaccatggtgatacacagcagcgtatcctcgggcatgcgatcgaacagggcgttcaggccatcacccttgagcgtctcgccggtgaaatgccctgtcagcggcgccttgttcaactggtcgaccacgatcactcggtgtggcatggcatcgaacagccatacgccctgggtggcatcggaaacaggctgccgatagaacaggttctgggagaagtcggtgccgtcggccagcggcaagtcatcctgcaggatcggttcgtccggccggcataccagttcgtagaagcgacgtagatccgcatcggtcttgccgaggtgatccgggtgcgggttgaaccagcggatcaaccagttcctgatctcctgtccgcccatgcgcgaagcgacgatgccggcgttcgccaggccgccttggatacgctcgcagatggacttcaggtacgccgccgggtcctgtccgcgaatctgcgcatccgccttgcggatccggcggtagacgaccatccgcacgcgccgctgttgtcctcgccagggcagcttgctgacggcggtgtcgacgaacagtccgcccggcttcgaaatgccctccaggtgatgcttcatgagcgccaggtacatctcgctgaaggctgatcctcgcgctcgaggatggacgtactgcctcaactgctcctggaaattgtcccagctgatctcgtcctgggcgtagaactggacgatccagggcgaggtttcgtgctcgtcgaaggagttctgcagggcttctttcaatgcgtcccgggcgttctgcatccaattgggatcgcgaccctcggtgcccaagggcaccagctcgaagaagacggcacgcgaacgtccatcttccaggagcatcacctgttcgtcgggcaggtactcggcccagggcagcaggtcgacgaacgatgggtcgtgatcgtagaggcgtgacgcttcagcctgcgtggcgccattcttgctcccggtgttgggtaaagggatacccatggcggccagtcgcgccagatagcgctcagtcgcttcttccacggccgctacgtccagcgctcctgaatcttcgggagcgtctgccggtaccgactgaggctgtgtgcgaccgcgcagaagggtttgaaaaaggcccatcagtagtcctccgtgcgctcgcccggcatggcgtactggactcgctggtagaaggggaacacggtggtatagcccggtaccggggcgggatcgctgccggctaggtgcgggaacacatacatgaccaggtcgggattgggcagtcgtttgaactggctgtggatctcgttgctggccgtgcgggtgtagtcggcctggtcgttcgcggaggcaacctgctgcggattgatcgggcgccgcagcgtttgcctggcatcgaggagtagccggccacggctgttgcctatcgagctggttgcaccttgttcccagacgtcgagcatgttggcctcgccgtggggcagcatctcctccttgctggtggagcacgctgccagggttagcgcgcaggccaggccggcgcagagacgaagaagggggttagtccaggtctgctgttgcatgagcggctccagagctgtagtcgaccttgcggcccttgagttcgtagtcgatcgccagttgctgatcgagatgcacggcgacccgtgcgccaggttgcacgtagacggcggcgaaggcctcgccgtacagcttgttcatccactgccggatgtcgctgacgccgccggagaggatgctgttgagggccgagttgctgttggttccggtcgtcccgaagctggtgccgttgccgctgaagacggtactggtgttgttctcgtcggcgtccaggagcttggcgatgccggccccggcagccgtgagtaggctctgattgcccaggtactccttggcattggatcggcgatcaccggcgatgcaggggatgccgtaggggtcgctgatccagccgaggccgccctggatggttttctggtcggcgctggcggtctggttgttgttgctctggttgtcattcacctcctcggccggcgccgggaaggtgcgcacggtcccgtcgttgaacgcgaacgtgaggctgcggatctgcccacgcacgcaggagagtgtccagtcgcccgaggcggtcccgctggctaccgcgccggcgacgtccggcagctcgatgccgttggcggtgaggttgtccgggccgatgaggattttgaacgggtaaggatcattgaccgtcccgtcgaccggcacacgaccgatcagcgcagacatggccaccgagcccatgagcgtcgagttctgcggcagcgtgtaggtcttgcggacgagcttgcggttttccaggtcggatcgctgttggccgacggggtgcagcccgtcatcgatccgctccagcgcgttctggccgcgatcgaccgcgttgccgaaggaggtcgggaagctgaatccgctcggttgggtggtggagccggcggccagcggctggccattggcatcgaccgcgcgggcgtcctggggctcgatccagacgatgtccgacgaagacgagcccgcaccctggaagtgctggccatcttctggtcgcacgccgaacccgacgggcaggtcggtatcgccggcctcgggaacgtgggttaggttctcaagccgtttctgtacctggtccaggatcgtctggctacggttctcctgctgttgctgcagctcctgggcggtgttgttgagcttctgctcgatgttctgatcgatgttgcgcaggcggccctgcaggttctcattggcggctttgagcgagtcattctccttgatgaccttgctgatctggtccttgagctgccggctttccgccacgatggtacgtagtgtgtcggcgggcgtgtcgccgtcgatgcccagggttgccgcttcttccgacgttaccgtcggggttgcggcgccttgtgattgcgcgctttccttcttgcccatcatgctcacgccgatcaggatggcgccgatcacgactgggatgaccagcagcttcaggaggggattaccggtcagcgccacgacggcctcctttgggatcgatctggctgatggaggagggcaggagcgcgtcggcaaggccgcggccgcgagtcaccagatacacagtagtagtgtcggaagcgtcgccccgggcccccaagtacgggtgctggaaggtcgcggcgacgaaattgcccatcaggtccctgggatccagggccaggtgctgggcgctggcgttctgcagcttcaccgccgtgacgtagtagtcgtccagccgccaggcgcccaaggcggtagccgtgatgggtaggctggggagcagggtggtcaggtcgagctgtcgcttgacgcgcacctgaccgacgccatccaccggttccaccgtgcgaagcggggcatagagcatctgcgccgcatagcgcgtcagaaccacggggatgggcgtttcgcgcggcacggccttcggtgcttctgcctgctcggtctgtttcgctgctgccgatggctgggcttcccggggctggccatagtgcggagccacgggctcgccggcgacgatcctgaccggctcgcgcggctgttgatcggccgctgcctcggtggcggcgatatcgatgagcatctgctcgccattggtcgcgtcctgcaggcgcaggcgcgctggaggaatcggctcgttggcgagcaggtagagtgcgccgccggtactctggacgcgcagcttgccctgcagatcccgaggaacgccaactcgcacgtttctgtcgacaaagacaatgcgttcctggccgaccgtcaatggaatggccaacggaatgcgctcccagcgcagaatctccaccgcgtgggccagtgtgggtagggcaagcattagcaagagcgagcctgtcgacttccggatcatagacctccctcccgcttggtgggggcggccggctcctcaagctcgatacgttgaggcgtatcggagtagcagtcccactgcaggccgaagggattggtctccgggtcgacgtcggcgcggatgacgtgcaacgggtagcgggccagcgcgcgcttgatcttttcgccggcgtaatactccgtgctgtccatgtccaggttgacggtccagtcattgatcgagtgttggatcacgcggccatcgctctcgccaatgccccgaccggggatttccgaggtggtgcgctctcgccccctgagctcgccggcgttacgacgaaactcgaagtccttctccaggaagactttgcaggaaggcgtcaggtaggcggcgtagcggaacaggttgctcttgtagtccacctcgccgtccttgggccaacgctgtacctgctggaagatgtagaggccgaacgcatagacactctccggcggaatgtcccaccacaaccgggtgctccctgaacgcaagtcgggcggaatgtggatccagaggtccttgcgggcttcccagacgcagtaggccagcaccacgatgaccatgcacaagaagccggtgatgaaccggaaggtgttgatgtgagcctgctgttgcgcggtgtgttttctgaaactcatggggactccgtgcgtcgactggtccaggcgccggagcgcgtcaccaggcgacggttgccgaagacgggaaagcgcagcgagagggccagctccacctggcggtagaaccaggtatcgggccgcccccgcttcatccgccgcaggatgcggctgccgatacccaggccgagggcgcctaccagcagcgcgcccagtggaatgcaggccgcgttacctgcgaccaaggcagccgggatgccaagaacgaacccggctgctccgctggtgaggaccgtgatccacatttcgtccgcagtcagaccgccgatgaccaccggttgccggttcaaacgggtcggcaggaagctgagggtcccatcctgaaacagatgttcttcgggcatgggaaggcccttacatgatggtggtggctttggtgacgagataaatgatcaagatcagcaggccgatgcctacggccacgcccgctccgagatccgaccacttctttttcccatcatggatggcgtgataggtgccgtaggtatgccaggagactcccagaaagacagccacgcagatgagtagcgcgaggagcatcgctccgtcatagccgaagttctggatggtttgcatgatccccgatccttccccgcggctaggcgcctcgggcttggggagtgcagccaaggcgacgcctgggagtaccaaagagatggcagccaggcgcaggcagagggtggacagtttctggagggtgaatttcagcatgagtgtctccgtatgggtcagctgaggaggaagaaagaggtgatgctgaggaggaccacgatccgtatcgcggaaacgccggcagtggcgctgtcgaggttgttggtggcccagccgcgccaggtgctgtacatcgcccaggcggaccacagcagaaggaaggtcatcgctgctccaatgaacagcccctcgccggccgatgggggaaagccagcggcggcctggaacgctgatgtttgggctccactcatgctcacggcatcggccctccgcgcagggtgtaatccccagataggtcggaagggtcacgcggttgggcgcggctgggcgtcatgtagtcctgcaggccttggcggatgcgctgcagatcagcggccaggcgcgagtagtcgaagtagaagcgctgtccgggctcatcggcaccctgggcactgcggtgggcggtgtcctcgagggcgttgagctgccggatcatcacctccaggttcgcctgctcggaggcgctcgctgcgaaagctccctgtgcgaccagcgcactgcaggccaagacggccaggcagcttcggcgaagggattgatgtggagtgttcacggcgaatctcttgcagatcagggtgcgatcagcttgccgatcgccctgattccattccgcaagaaatactcggcgcggggccggggtattttttatgaggttgcgcgcttgaaaaacagcaggtagctgacgggcagagcgatgccccaggcccagccctgggcgttctgattgccgatctcggttacaccccgcatgagtggctgaacgctcaccagctcccagccttcctggcccagacgcacgacctcggcccagcgcagagggttgagcaaggcgtggtcgtcgggttccaaggtgtcttctttgtgtttgaacatcgcgacgcccttggtgagggttttatagggaatgtcgatgttctcgacatggtattcgaaggtctgcttcatgacgtgctcctggagtggttcgagtagaaccgcacggtttcaagagcaggaggagggcctcaaccgaaaatactaggcctagcaccagtgaatttctggtggttggcgggtttagagacacgtatggacgtctgggtgtatatttcatatatatttctaagggagacggctgatgcttagaaacatctctattggagttttgctagccatggctgctatgttggacagttatggggtggctgccgctacattacgatgcgggtcggcaattgttagtgagggtgacttgattgatgatgtgcttaggaagtgcggaaaccctgatagccgtaaagttgaagggcccgcagtggatggtagtggctatatagtgcggggggctgctactgtcgaaaactgggtatacggaccaaggaatggttggtaccagaagcttaggtttgtcgatggaaggctagttcagataaaaggcagtatggactagggtatagccgtggatggtgtgtttttcatccacggctataagtctcatccggcagatgatataagggtaaggatatttgcgattggtaggccttgtgcgtcggaaataaacacggttgcactagcgcctgcacgagaaactatctgttgtaggttgctcggattagacatgccgccgttgtaattggcttggaattgcttgctggaacttgctatgtctagaagttcaagtagagtgctttggttggcggattgtgcggagttcatactgattgatgtgtttgatcctgccgctcgcagcgcctgctggatgttgtttgaagtgagttgggcaccattaaagttggcgctgaattttttagtgttgcccgcgatgttgatggcctgtaaaaggatggatatattcgccgcctgagcggtgttgacgctgatactggttcccgaggccgcagcgctgatcgcttgctgaaggttgtctgctgttagttgtgcaccattgaagtcggcgctaaattttttcgtgtctttggcagagttgatgagggctagcagggtgcttatattaaccgcctgagcggtgttgacgctaatggatgttcgggttcctgcggcgtctaaagcttgttgaatgttgtttgaagtaagttgagcgccattgaactctgcgctgaatgtttttgtgttacctgctgcatgaatagtctgaagaagggcggttatatttgccgcttgtgcggtgttgacgcttatgctagtgtttgttcctgccgcattcactgctctaagtaggttgtcgctgctgagttgggctccattgaattctgcgctaaaactctttgagttgcctgctgtagatattgcggaaagaagtgtatttatattaatggcttgtgcggctattgtggatactctggttaatgatcctgctaagtttatgacttcctgaaggttgttggcagtcagctctgcgccgttgaaagttgttgagaggttttttgtgttttctgcagttgttgttgccttgagaagagtgtctatatttaatgcttgcgcgttgcttatgctgatggttgtattctttcctgcttttgatagggcctctagcatgttgcttggatttagaaggcgtccgtcgaaatcaaggataagcttcatctcaatgctccgctgtgacctaacgttaaagtcttggtgtgagtacttcctaggctgaatgagttggctacaaatctctttgccttatgtcaatgtcaggcattcgctgtgaccaatatcatttttttgagtcatttttcacagctagctatctgctccttcagctttctgtcgtccacgtaccgctgcatgatcgatagcaccaggctattgatggcgaggatcttcatcgcgcgggtcactgcgacgtagatcaggttcagctcatcgtcgcgcttgcctgggtcggtgtcgggggccagcgggtccgcgttgaagtcgtcgtacaggcaaacgaaatcccattccagccccttggccttgtgtgcggtggtcagggtgatcgttgcgtccagctcatcgtcaagggtcagtgagcgaagctcaaggatccgcgccggtagatcagggtaggtcgagatgatcttgatcgagcgcgccatttcactgtcctggctgatctcggcgatctccacgtactgggtgtagtcgcggtagtcccggagcagctttttgttctggacgttttggcgcaggcctcggctgaatgcgtacagatcctccaggtcgcgcagcgagtaactgtcgataccgcctacccagtagaacttgggcgccggattattgcgcacacgctgcagggcattttcgatgacgccgataacggtgcggtgaatgaaagtgcggtgaggaaggtccgccgggagggactttttcaccagcgtctgcgggcccagtccttgaagtttccgtgtctcgcccttgtaggagaggatgatgttggccacgtgcgcaatcgcggggccgaaccgccagctctgggtcaggtagtgctcctcggcgccgaccatccagtcgctgttcagggcatcttccgcgcctctgaaccggtagagctgctggtggggatcgccgacgatagccattttgatgcgctgccagtgggcaatgtccgcgatcactgggttgatgtcctgtccctcgtccaggaacatgcagtcgaagcgctggctcaaatcgggcttgctcagttgatacagcttcaggtagccgtcatggggcatcagcatgccggtgtcctggagatctaccatgcgcctccagactactcgcgccatgtccaggccctgcttgaggaagcgttcctgggcactggtgaggaacgccttgtcgcggaagcgcgggaagtgcggtcggccgagttccgcgtcggcgctggccatgtagttgttcagcgtggccagcacgtcacgtaccaactcccagtcttgggtatcgagtccgcgggcgatatcggtcagacgcaggttcttcgtcttcttgtgggcgtactggatgccgtacaccgcatgagccaggctgtgggcggtcttgcagactacgttgcggggaaacttgcccttcgcggctttctccaccgagctgttgtagcagagatagaggattctcagggtagcgttcgccttggcaaagcccaccagggtggtcgtcttgccagtgccggcgaaggcccgcaccaggatcttcgatgccttcgactggatgatcggtgactgttcgtgagtccactgcacggcgggtctcctacaggtactttttgaaggtggatgctgtgatacataccgctacgccgagcagcgcggcgcagggcaacaggatgagcaggggattgatgctgatggggattgccaggtagagcgtccaagggacgatcgctagcggaatgatgctgccgcgcgccttgtggtagaggtagctggactcccggccggcgccgaacttgcgcaggtcccggcgcaccaggccgtccaccaggccggtgaacgcggccatcaggaacaacgggatcgtcatggccaggatcaccaggcgcacgacgaatgtcagcaccgtgtacagcgcggccaggccgtagttctgcagcgtggagacaccctgggcggtgagatagcgaaggtccagcgggctccgtggcccggcctgcgcgatgatagtcatgttggtcatccagtcgaccatcccggtcttcacgaacaaccagtcataggccaactgggccagccaggtggcggttcgacctggctcctgcacgacgacgctgtgtagcagcccctgcgacagccaactgagttcgtactcaaacatggcctgggcatgcttccagcccgcgtcaggccagaagaaatacaggcatacccactccacgatgattgcgccgatcagcgacccgaacatcacgccgagaaattggaagggcgtactgatgatggtgccgagaagggtcttctggctctcttgttgctgctctgctcgttgagtgacttcagccatcaggcggcatcctcaccggcgccgaggtgacggaaatcgtcgaccaggtcctggggcagaccatcctgcagggcggagtatcccggcgcctcccaccactcgctgttggcggcctggcccttgcgcataccggcagccagctcctgcaggcttttcggcatcacctcgtcgggatcgaccgccggcagcggcattcggatcttccagagattgccgccctcgagtagcgcgaacgcttgtcctttgggcagaccaacgatgtgggccggctcgagcatcggcacgctggtcatctgcacctggtcgtgcgagctggaagtgaaggctgccttcttgttgttgatcgcgtcgttggcgccgctcgccggtgtgctggtgtagatctggaccttggggagctggttggtcaggagttcggccgtggcggtctcgcgcacccgcagcatgaacaggttgttgaagttgccgatgatctgaccggccttcgcgcgggagccgatcttggcctcgatgtcgctcatggtctgggtgtaggccgtcacctgcacgccggcgccgcccgctttgttgaccatggggatgaactcgtcgccaatcagctcgttgaactcgtcggcatgcaggttgatgcggaccttgccgccagcgagcgagccgggcaggccgtcatcgacaccatgcttgtagatgtgacccgccaccgagaccaggtcgctgaacatcgagttgcccaccgcggcggcgacctcggtatctgatagtgcgtcgaggccgacgtagaccacggcgcgcttgcggataacctgcatccagtcgaagatcggtcgcggatcgttgaggtccgcgtagttgggcgaaagcagctccgagatccgcccagtggtgagtttctccagcagcggcagcagcgaggccacgatcttgtcgaagtaggtcttgtcgtagcgcacggcgctcttcaggccttccatgaccgggtcggcgatgcgtttctgtgtcaggtactggtcgatggctacgacccgcaggggccgtcctttcatgttgaacgggatgttcttgtcgttgagcttgccctcgatctggatgatggtgtcccaggccctgggatcgtgctcgctgatgtatttctgcgcatattcgacgaacaacgcatcgatgttcacgacgtgccggaggatctgctggtagtcaggccggatacccagcgcgtgcagcgcgcgggcgatgatgttgacgaaccgccaggcgaactcgcggaacgccgcgctgttgccctcgccggagagctggccggcgacgcgtgtggcgacctcggagatccgaccgaaccggccgacggcgttgtagcgtgccgacaggtcaggatgaccgaggtggaacacgtagaactcgtccaggcggccggcacgttcgcattccacgtacatacgcttcagcaagtcagcgtcgcctttcgggtcgaagacgatcaccacctcgtagtccggctgctcctctgcgcgctggcgccgatagccgtggtgaaccgtctgggtccgccggcccatcttcactcgctggcgtcggcctcggcagtgggtgcggcgaatatcctgggtgatgaacagctccgcgagtcgcgtcttacccacccgcgtggtgccgagtaccagtgtgtggccgacgcgctcgcccagttgcaggcctacgtcctgttcgcgcggctcgatgccatggagccgaggcaaaccgcccacgggcggcagcggccgtgcggggttccaggccacgtcccaggcagtggctttggcgaccagcttgagggggaagggggcgaactcaagctgcttctccagccggcgcgcgcgctcgtagagcggcgagggctcgacgtaggaggcgaactggggcaggtaggtatctgccaggcgctgcgtatgcttctgcgtccagcgaaatcctttaccgatgaacaagtgttcgttgctgaccggcatttcggcactggtcatcgtgtacttcggcagtcggcggatgttccgccggtagcggagcaccacgccggcctgcttcagccgcacgatacccagccaggcgaagcccagtgcggccacgatgccgaacagcggagtgagggcgaacgtccacggcgcgacgatgcagagcgcggccgcggtgaagcacacggtggtggtgtagagctccacggcaggccgcaagagcgcttccagcgggtactggccagccatgggttacaccttcaggcttgccgccggctgcaggcggcccggtcggcggcccttggcatgaagttcgagcacctgtttcctggcttgctctacctcatcatcaggcagcatctgctccagcagctcgcagagggtcgactcgtcctctaaggccttggacgccacctcaccgccgtagcgtgagatcaggtcgagcaacccctggtacatgagttggcgtgcctgagcgtcgctcggctgcttgatgaccagggtgatcaggtgagtagtcatgaggactcctactgctggatggcggtggatgtgatgagagcggggtagtgccgcagacctagccggtcgaccaggtcgtccgccggcgccggcaatatctgaagtccttttccccaggcacggatttccgtcagacgcgcttcgctggccacgttcactgccaggcccacggcttggaggcctcggagctcgtcgcctcgctctttcagccaggttcgagacagcgtgtcgtcgccgaccaggaacagaggttgcaggcctggggcgttgatggcgcgcccctgaacctggcctggcgaaaggcgtaccgagcgaactggaaacgcacctgagccacggacacccaggtcgccaggtcctggtgtggcagcggatggctgcggatccaggccctggtagtaggggagcgccgaggcgccgccgaggtcttcgacaacgatcagcccggcggcccaggcttgagtcgcgaacgccgtgcaaaatgccagcgtggcaaggatcttcttcatggattggtcaccagtaggttgacgccgaggacttggctaaggtggcgggataccgtcctacggtatttggcggcaggcgcgccgccggcggggcggtggtagcggccggcaacttggatccagtccaccggtcttcccggggcggatgcatacagggcgtcccgctgctcgatcaggatgtcggaggtggcgtccaggttcttgtacggatccagggactcgcaggggctggagaaacgatgtccgttccagccgatgttgacctggccgaggccggaatcgacgctcttggccccgtagaggttgattgccgcgagtagcgctgtgcaggcggcggtgcgggtcgcgtagtagtaggatttcccggcgacgttcaatgtccagggccagggaacgtattcgccgcgcagcaggaccttgctctcggtcagcgcgaccgagtagagcacctcggccggaacccctttgggcagggcgatctgcttgtacgccggcggtggatccacggcggcctgagcgatgttgaccagggccagcagggtggccagttggagggctcgaactacagacgttgccatcggccgttcacctcctgtaccagggcgggaagggccccgcccactcccagggccatccagcggccctcgtcatgattgagcgtgatctgcttgctgcgaaccttcttcgggtcgatgccggcgaggattgcccagtgccgcactcgctctgcgtcgttctggctaccgacgaagtagaggtcgaactccttgttctgctgttgcaggtcgcggacccgctggatgcaggcggtgcagttgtcctggacgaacagggccaggcgcccgctgctctgcaacgctgggctcatgttcggcgcgcccgacgggttggccgcgctgctttcggtgaggcggatcaccccctcgcctggataggcgcgggcgaaggcttcgtcgtatgcgcgctggtaggcgagttccttctcgacccggcgccgttcggcctggacctgtagatcggcataccgccgccgttcctctgccgatcgtgcctcgatgcccagcgcagtcagcgggtcaatgccaggcgagtacacgccccgggggccttgcatgagcgtctggtagcgggtccagtcctgttggttcagtccccactcctgggccaggtcgctctgagatgtctgttgtttcagcgtgccgagttggctaccggacagctggctgctggtctctcggcttgccgcagcctcctggccgactgcgggatagctcagcagcagcaccaggccggacaggagcgatacggttctgatcatgggcggggtcctatggttggatgcgaacgctgcgcgaggcgccggcgacgtcgaagtgcgcggtacgatcgtcaaggtcggtcagtcgccaggtcgtgccggcgacggcatcgccttggcgaatgaggtagatctggctgagctgggtggatcccggaggtgcaaccgacagaaaccgttcgcccccgcgatactccacgccaaggatcgagaagggcggaggctccatcggtttgggtttaggcttgggcttggcgggtatggggcgtttgggcgctggcacgatcagcggcggcgccttggtctgcttttcttgaagcgtgcggacagaaccgtccagtgtctccacggttgccttgagcaccaagaggtcgccggccgaggcggtggtctgagccaggttctcgacggcatcggaggcctgcttggcgaacgcctgcgcggcgtcaatgcggttggacagcgcctgctggcctgagcggaagtcctcgttgctgaccaggtgctgtccatccacggcgtcgaggcgctcgtcgactcgattcaagcgagccaggatcgcctctagcgaggtcttttccgcagcactgtccacgcttgatcggagctgagtgagttggtactgctggtagcccagcaggccggccattgctgtcaagcagaggccaagaatcatggatgcaggggatgggcgtttcatgggtgtcctcgcgcgaagccagagacaccctctcagacagcctccattgaggcagtaggaaatactcggtgagtgggggtgggatttttttggatagaattctggcgaatcgccgggcctgatgcgctatgcgaagatcagtcgattctgggtgcccttcacacgcacctaggctgtgtcatttctgcttaacactgctttgaggaagcctcaggccatgaatacagaccttccccagctcgaacaaaccatcatcgatatagcgcgccaggaactggccgccgtggctgctttttatcgcaagagggaggcagggattgagagcgcgcacttcgatgaggcatggagcgaatacctggctcgctaccatgcactgagtacgcttttggtgctcggccagttgcctaatagcggaatgagcgaggagggtgcccgaactctacgggagatcgaagctgagtacgttgcgcttcgagtctcggccaattgagcctatgcgttcgcagctaccagctattcggttgagttcttgctagccaggcgtctgtactccctcatcgtgtcgagatacgccctgtgtcgttcagggtcagagcgaaggtggtcgcgccatcgggcgcggtaggctcgatcatacgcccggatacgctctcgccaatgctccatctgttccggtgtcatcaggtcgaggcgggcgcgcctccgcgctagaatttctgctcggttcatcgcatagcgcagtgcctggtaatgcctgatggccgtgcggttttcaggtttcatccgccaacgggcatttgcgcctcggcggatttgcctgacgcgctcggctaggtcaggatcgtcggccatgcgttcaaccaggcgctgatacctctgctgattgaactgagggtcagctgcacgcctgtggtaacgttcgatgtcctggccacggcgtttggctttatggcaggtgtcagagcatgtgacgctccgcgggcgggtcgacggtaccttttccccgcaaacaatgcactccggccgctggcagtatgagcactctcgccacccgcgttgcgtcaacagcgcctgggcaagagtctcacggcgcccgcaattgcactctacgagccagccgggctgctccttgccaaattttacccggccattctcccgtacaacaaagagacggccgaagcgctgacctgttagatcaagggctgcaggcatccaaggtcttcctgtgctcggtctctgtttctctccgcagtttctcacaaaaagaaaccccgcagtttagcggggtattcagcttgctattagatttcgacgagtcagtctacatccctatcgattgcatcaccatatacacggatgccatgctggttgacttcgccgcatatcgagatgattctattgatttggatgtcgatgttgtaacaaagcacgcgaacaacttcatcttcgtctgagtgagtacggcggacatatcttgccaaaccttccgcctgcttgctgagcatctctgtttgaaagactatttgcgatagcacctcagaaacgacgccatctaaagactcccgcagctccggatgctttctccaagcggcgaccagcgctacctgggcatcgccaaagtttttttgttgattgctcatcttttttccctctagaagtcattcctcgggataagagaatctatcccggaaaatcttcatcagtcgactgtgataccgatcgccgccgagcatcgcatgatttatatacgccgtgtgtagcatgaggtttgctatgcggtgccaccagccgaaatctgtgaaaagatcaccagtgttggcttttttccaaggagcctgttgttcctttaagtatccttcttcgtgagctgtgccctcaccatccaggtgcattctgatccattcgcgaagctctgaattgatcttgctggcaaagccaattgcagctcttgtttgatcgtcggttagtttttcaatgtcggcttcttcccaagtttgaataaacttgtttgcctctttaattgaacgggcgatgatgtagttttcgtccatctcttcaccttccattgatgttgggatatggagtcgctgtgctgagaaagcaagctgttctgcgtgcagggtatcgcttaccgaaagtttcggcagcaagagagtgaggttgcccctacggggctgttttaaaacgtcagtcaggggagggggcttccatcaacctgatggtcgattgatcgcgcttccggaagctggtgcgacctagggagtgatctacacggtaatccgtgctgtagcctcgcagatcacggctactggaggggtgccgacaacgtcagcagctcacggctcaaaggatggacaggcggaagtttaaagtcaacaacacgctgcaatggcttgaagggctcaggtaaatacccgcttggcaagttcaatgccacgccggcaactgctgagggtcttattcacggcttggggagtgatacctgtcttccgggcagcatcggtaggcttgagaccatttaccaacaccagtcgggcagcatcctcgccaggacctccgcgcaggcgcatcaactcagcaagggctgaaaactgctcttccgtcatgcgcgacttggccccgggagtaagccggcaatgcaggtcaacagtcgctgggcgccggcctggcttgatatatcgttgctgaccatatctccgccagccgctgcggccaggcgacgcatgaatcccatggcagcgcgatcaatctcgggaccaacgtagagcacatcaatcacgccacgaaactgggcggcgacttcgagagccgatttctcgttgtcaggttggccatcactgatgacgagagtcacaccgggattgaattgcaaggctgctcgcagggccgcggtcatgttggtactgctctccggctcagggatgtgctggacttcccgtggctggtcgctgaaggcgatcaatctcgccggttggcgttccagggctgcgtctacagcttcgcgcaatacgtcgatcttgcgtcgctggccccaggcagtacatcccattgatgcggagatgtcggccaggatgatgacctcgccttgccgacggtccagtctcgcttggtgtgtggctacccggccagtggtggcgggcagtgttttgctggccttggcgatgagctgttgcagggggttgatcagttcattggacatatttcggcgcctcgtgccaccgtagttctatcgaaatttatcgcccgtacagccacgcaaacttcacgagcccaaggctgcaaggagggagtgagcttggccagggctggcgaggtccagatctgatccgtggcctcggcatagtcaatcaggtgccacttcacgtcagtgccggtggagccgagattcacctggaggcggggacctgatactcgtcgtgtccagtcgctggttttccagactaacgtcagctcttgaggcggtctcccaatcagataggcaacttgctctagatatcggcgcagcaactcggtgcgttttgatcgcatcttttcgtcagcgacggccttgcttgcagcttctgctactcgctcggcttgttgaatttcatattggcgggcccgttcggcgccccgaaggcgagcatcgatcttctccctttcggtggccagcgcttcggcgaaagctgcttgcagcgctggattgcgccgggccgcctcttttgcaatggcgatggccagctcgacgagttggtcatcactcaggccgctgaagtccaactcatccatagctgacatcgcactggggactattcatgcttttgcctggtcgatttcgtcgtcagtcaactgccatacggcattcgctacccgtcgcgctgaaccaaaccgctccagaagtgtgaccgcgaggaggtgcgtctgggccgtcgtaattctcttgtaacacggcctgcggtaggtcgcttgcgagtgggcttcgattgtcgagagcacggtatcggcgatgccaatgattttctcgttacccagttcctctcctacctggcgggctagatgcaccacctgggcacactccagggcgagctgagtccactctaggttggcatcttgtgtccagcggctggtttcagctcgcttgagcgattctgctgcgtagtcacggtgccaagtcttttcgtaggccatgtctttctcggcaggggcgttggaggttgggttgatagcccaacgttgggtttgaggttatccctttaaagggatatgttcaagcaggctgattgggcaggcagatgctctatctcccaccaggcggtagtagaattagatttttcctacggaggcctgatatgtgggtggttcgactagagcaagggtggacgctgaagctggatcgccagatcggcaattcgggtaaacatggactttggtccttccactgttcggagagtacctacgcaccgagtcctactgagctattgcgtacagctgcgcttctgcctgcagagccgaaacaggggcagatgattgaagtaagtatttgcgatagccgccaggcgccggaagattggagattcattggaaagggtgtggctacagaggaattcggctaggttgactgaaaggctattcctaggaattaagctatgacgaattgctcccttgatgcacttgaagaatattgagaaaagtggttaaggtttcttggttgtatcaagcttgtaaaactgctttataaccataagggggttattatgactggtgaaaacagtcttctcgagaggatggttgatggtaagttggggccaggctcagatattggtcctgccgattcgcaaatagagggtacttaccggcggggctatcaccaagctatggcggaggttgcatattacctgaagaatgggggaaccttgtccgcggcttcactgaatgattgggtgagcgaggaccttcgtcgctggcgacaggggaaggataacgccccgattcatcgccagatacttcctcctgcaattcctggcagccgatagccgatagttgaactaagcctacccggtccgctgaggctctatgaggtgtgccccttggttgcgaacattgccgaccgcgcggtcgacgcgataccaggtgaacacttctggagcctcaccttcctgtaacaccatctgttctgcccgttcgggcggggttgccccatcgacccactcccttgctagctctggagaaagaacgacgggccgccggtcatgtacatcgaccattccgccctgggcatcagccgtgatgataacgaagccatggcgttcttcctgctgtctgtccagttcagggaactggccgatcgttgcgcagaggacggcggcaccatcggcacgctgaatgaagtagggctgcttccttgctcctccctcgtccacccactcgaaccagccgtcgatcggggtgatcgccctgtgcttccagactgcgctgtagaagcgcgaatgggcgactttctcggctcgggcattgatcggtgcggcacggtcctgggcccagaacggtcgccaaccccatcggacgagctgggctaccagatcctcgccgaccaggcgaaggatggcgacctgtgttgaaggggctacgttgtagcgttcgagtggttcaccatcggtcaggtccagaaatggccagtcggccatcaattgagcgtactctctcgcgccctggtactgagctactcttccgcacatagcgcaccgtgcctccgtctgtcggatcttggcctacctgcattgtaggcaaatcctgtcagcgtctactgtataaacagacagtatacagaggttttcatcccatgcccgttactatcctcggcccagtcgctgggtctggggcttccttgcgcctgtattccagcaaggtgtcggccggcttcccaagtccggcgcaggatcacctggagcgggagatctcgcttgatgagattctgcagattcgagcgcctcacacgtacctggtacgcgccggcggcgacagcatgattcgcgctggcattcatgacggcgacctcatggtggtggatcgatcccgagaagctgagccaggagacatcgtgattgcagcggtgaacggcgagcctaccgtgaaacgcttggcgaaggatgggagccaggtggtgctgcgcgccgagaatcctcggtacgcgcccaggtacatcctggaaggggatgagttgctggtttggggcgtggtgcgctacagcgtgaggtgtcatgagcatggctgaccgcgccatcgccctgattgactgcaacagcttctacgcgagctgcgagcgggtgtttcgaccggacctggcacggaccccaatcgttgtgctgtcgaacaacgatctgagggattgcttccgttagtaaatgaattacagtccgcaccaccttgatagaagcctgagaaattacattccagcctctgaaggggagtcatctggatggtgtttaaggctgtgaaatgaggctggtgttcgcaacaaaagaccttgctgtagcgggtcgatcattcgaaggtttccctctgttggttggcgccgacggttggccagtggagccggcgcaatctttcctttggcacacgctagtcgagtcaggtgaggcactcagtgctctgacgtgggaggcctatggacgccgtctgttcgactacttcgccttcctcgaggccaatggtctggcctggaatgaggagagtcaggcagatggcctgagcgtcctgtcgcggtatagagactggtcgagcggtgagttggaactagatcccagcactctgaacaagcgactgaacctaattgtgaggttctaccaatgggccaagcagcgtgatctgatcgcagcgctgccctttggcgagcgaagggtcagagcgactccgcattccggcttcctcagtcacgtagctcgtcctaacgccgagagtacgaagccctcagtgatggtgcgagagcgtaagcgattgaccaaattcctgaccaaagatcaggctaaggtttgcctcgccctcgatgccgatccaagtcaccggatcttgttccatctgatggttcgcactggtcttcgctcctgcgaggcgcgcactttccctttcaagtacgtctttaatcctcggctgaagaagggcctccgccctgggcaaatgatcagcgtggctctcgagccatcggacatgcatctcaagtacggccgccctcgaacaattgacgtgccttggtcgctgatggaggaaatgtggtcgtacacgcttcatgagcgcgaagtacggaaagcggccggcaacgggcgcgccacggccttggtgctgacaagggaggggcggcagtacacgaaagactccatcgtcgacgtgatgaaggcgtatgagcgcaagtgcggattttatgttagggcccacatgcttcgtcatacctatgggacttatacccttcttgccctgaggaaaagccgagactttaaaggagagccattgctctatgtccgagacaggatgggacactccgacgttcaaacaacgatggtgtacctgcatctcattaatcagctagaggctcagtctgtccttgctcatgaagacgagatagacatgatgtttatggccgtctctactccaagcatctgaggtactactgttggcccgaaagaaaaactataaagctgaaatgcaatcggtcactaaaggattcgagaccgtagagaatgagcttagaatcgatcttccgaaaaatccccggaatgtaactaagattgatcactctcagtacattgggtttggctttgacgcatgggctattcagagtattcatgtaatcagagcactggtcaatggagggaatttctccctggccactcttgtagggtactccagcaatggccttcgatatttcatggccttcctgaaaagcggaacgattgattctccgccgtcaaccccgaacagcctgaccaagcggcatcttgagcgatatgtttcgtggcttaagctcaagtatccaaacgggtcaactgcgaagaactattacacgtcgctgaagtcattgatcatcagcctaattgaatacggattcgttgaggcggataaagatgatctacttccagccgttcctttcccccataccgcgaaatcgaccaatgacgcgaagccgctcagtctctcggaaatgcaggggctcatcactgcgctaaagtcagatttagtagccattcataagggcttattctctggaaatgacgccgaagcaatgacggtcttattgctgattactgcggccagatctggaattaacactacgccgcttctggaaatgtctagagatgcactccagccgcatccattcatccccaatcttcggctcttgaacaccgtaaaaagacgcggcaagggtgctcagagcaaaaccattcgacaaactgaactgcatgacggatataacccaattcctttagatggggtggctgttgtaaataaggctttggcaatttctgagccactggttgggtttgcgcctgaaaagcttaagtcgcatgtttggctttaccgcgccggacagaatgggcatggtcatagggtagtcgcgctggcttccagtacgctatttcaatcaacaaagagtatctgtgcgcggcatgctttgaaggacgatcagggccaaccgctgatcgttaatctcagtcgtcttcgaaagactatggaaagtaggctttggaagctcagcggcggcgacctactggaggtgtccgctgtgatgggccattcccctagcgttgctgataaccactatttgaagataaatgacgagatcaaggttgagggtgccaccttcgtaggggaagcattcaccgatcagctgcgtggcatcaacgtcacaccgacacccccaggaggttgcaaagatagcctctatggaagcctggcacccaaagatggcgttacccattgttccgagttcattcattgcttgacatgtcctagttacgcaattgtagggactctcggagacttgtatcgactgttcagctatcagcagtttttgcacgctgagatggagtattttttaacagatgagtgggcggcatggcggaaacgccagggcgatttcatcaggcttattgacgagtttacgtctcgaaaattcaagattgaactgatcgaagcggctaaagccaaagcgaaagcgtcccctcatccgttctggggatgcaagattgagtttatgaggaaagttcgaggtgacgctcttgtcggctaatcggaactctagggccgcccttaaggcctatgatgtgctattcgcgcaacctgtaactgcctcgggcctcagcaaggctgagcgtgatgcgatagttattagtgccattgttaatgatcgtggcgaaactcttgtattaagccgctttggcgatgctcgctgggatcttcgacctttctttgatcaatctaacgtaaacgaggggcacaagtacgtcagttgggattttaatctcccacctgagatgattgatgactgcaaagcagttgcgtatgcatggttcaagagagggcttccagggtcaaagccacctgtcgcacggggtattacaactctcgtcagtgccagtgtcattccatttattcgttggcttagcgatttagagcttgaacgattttccgatgttcggcccatacacattagtaattatattcaccattgcaagtcagagtcgttaagaccaatgcctctttattccaggctgcggataattgactttttatggatattctctgccgaaaccctttcccctcttcagtgttttccgtggggggactcgtccctgtggcgagtcagcggaattggagaagcaaggggtacttcggctgccaataagaatacgggtagaacggatataattccgccagatgatcaggcgaagatcttcaactattgcgagcagatcgttcataagacgaaagaagatctgaaagccaccggaattgacactttcactcgccgcagccccaaaatgattcgttgccgcgatgctgttttgtacattgcatccattaccagtggcatgcgtaacgaagaggtcatcgggattgaagtcggtgcgtggcgaaaagaggtagtggatggcgttacttactgctgggtaaccacgaccgagcataaaacgggaaagggacgagtcgactatcttgtccctgagcttacgctggatgcgttgaatctcttcgccatgtgctcaacccccatgagaagggagctcgaggcggagttgagtgaccttgaactgtcatgcaattcagttgactccgctgatcttttgcttcgattggagaaagccagaaaggactcgaagagactgttcctctgcttgaatgggtacggcaacaaagccgaacgtgttggacacatcgaagtgctcagcgccgcaggttccaatgaagccttcaagcgcgtcgcaaaagcggctggaagtgattggccattgcggactcaccagtgccgtcgcacctatgcccggtgcttcgttgagtctcgcatggggcgtacctcgctcgtcttcctcaagtggcagttcaaacacagcagtatgagcatgactcagctctatgcctccaaccccctacaggatctcaccctgttcgatgaaatcctccaacagatgacggaattcaagatcgatctcatcgagtcgtggttggatgatcagccacttgctggaggggcgggtgagaggatcatggagctacgtgccattccgatcaaagatcggagtgccttgctggcccagacagccccccatgcaaacattcgagcgactggtcatggctggtgcatcgcgacagaacggggctgtggtggggctggtttgtatgaggcaacccgttgtcctggctgcaaacactctgtgattgacgagacctttgccaccacgtggcaggggatctactcgcatcagctggagctgatggaaatcgacgatgccgggccggctgtaaggcaacgggcaaaacgtgatatgcaggtcgcattcgacgtaatcagcagccttggcctgtctcctttggacgctcgcgacagtgacccaacgcgaacttgaaggtgccgactttgaccaataagccaactgcgcaacgatcctccggacgctccagacagaagacctcggagatgctcgataaggtcatcgacggcatcctttcaacaaacggaaagctgtccatttctggcgtagcgaaagcggcaggggtcactccaggtctcatccacaacacctacccagccgtggctgaacgcattcgtggtctgatggggaaatcagtccgagcacagcgcgattcgaagcaccaagcattgttgaaggagagggagctgaacagagcattgcgcgcggagaacgcacagctaagccaggatctggctcgactggcctcagtgaatcagaccctgattctcgaactagctcaactgaagggcgtagccactggtaaggtggttcttctgagcagtaagccggcttcctagcagcgctggggtgtgcctcacctcactgtccagagctgatctaaccgtgtggtatagcttgggccgagcatttcccgacacatccccagtcaggagtcaccggcaccccgcccaggcggagcgtgcctcgaccccacttggaattgatccgatccatcacctgcatgaccttctcagaggcgacgggctgtacggcggcgatcacgatgtcacgagagcgaccgagcagattgtctccatgcgcgacaaggctgacgcaatcctagtggcggaaaccgtcaagaagattgaacaactgggcgccacggcggcaggccgtggcgaagcgaagcgcagcccggctgtccgcctgcaaggtagatatgtgctactcgaccagatgcaacgtgggcccgccccactgatgcacaagggcaaatagcagtaccaacctagggcctttgcaagtgctcctttgcccagtcagcggcgctcaatgagcgccgctctttccaccttcagaccgacaaacagagagccctgacaaacgggaaatcgtgggctaacgcgcgaagtgcgggcggtcacttgctcgcttgcagcgaaacgatcagcggacagctcactgtcccttggctcgcgcaacagtcatcaaccagctgcgccaagaccgactcgatccgctgaagatccgcgagtttctcacgcacatcctcaagcttctgctcggcgagcacacgcgcttcgtcgcagtgcgcgccgtcgtccagtcgcaacagtccggccacttcatcaaggctaaagcccagccgttgcgcggacttcacgaatctcacccgtgcgacatccgcctcgccatagcggcgaatgctgccgtagggcttgtccggttcgggtaacagccccttgcgttgatagaaccgaatggtttccacgttaaccccggctgccttggcaaaggcgccgatggtcaggctttccaccgcgttgtgcatgccgcttgaccccgtacctaactacggaaataaccttaacccatcgatcaaccactcggaaggatgaacgtatgtctgaatcgcgaaatgggcgcggtgcactcctcactggaggtctggcggcaatcctcgcgtccacgtgctgcctggggccgctggtgctgatcgccttgggcttcagcggtgcctggatcggcagcctcaccgttctggaaccttaccgcccgttcttcattggcgcggcactggttgcgctgttcttcgcttaccggcgcattttccgcccggctcaagtctgcatacccggtgaggtctgcgctgatccccaggtaagcaccatctacaagctcgttttttgggtcgtgacggccttggtgctggtcgcgctcgctttcccctacatcctccccttgttctactaatcaggagttggtcatgaaaaagctgcttgccgctctcgccctcattgccgtggtttccccagtgtgggccgcctcccaaatcatcaccctgtcggtgccgggcatgacctgcgccgcttgcccaatcacggtgaagaaagcgctgaccaaggtcgagggcgtgaccaaggccgaggtgagttatgagaagcgcgaagccatcgtcaccttcgacgatgccaagaccagtgcgcaggcgctgaccaaggcgacagaggacgccggctacccgtccagcgtcaagcaataggcgggcattccgatggcaaattctttcaatctgttcacacggatcggtgacaaagccggttccgtcggcgtgctggtttccgccataggttgcgcctcgtgctttcccgcccttgccagcctgggcgccacgatcggactgggctttttgagccaatgggaaggcctgttcatcaccacgctgttgccgttgtttgccggcgtggctctgctcgtcaatgccctcggctggttcagtcaccggcagtggcgacgcgctgcgcctggcctgatcggcccggccctggtgctggtagcggtgtttttgatgctggctcacggctggcggagcggctggctgctctatatcggcctggccgtcatgtttggggtgtccatctgggacttcgtgtcgcccgcgcaccgccgttgctccccggcgtcctgtccgacgccgccaaaccagtgaacctgacaagagacgattcaatgagtaacgttatgaccgaactgaaaatcattggcatgacctgcgcatcctgtgtcgtgcatgtgaaagaggccttggagaagattccgggcgtgcatcgggcggatgtttcctacgccagtgggagggccgaattgaaggtcgacgaggccgtaagccgtgaacaaatgcaggccgccgtcgaggccctggggtatcgagcggcgttcgaagacatcacgctacctacccgtcccggcctgctcgataaggcacggggctggctgagcggtggcactgacgccgggaaagagggtgacaggcttcacgtggcggttatcggcagtggtggcgccgccatggcggccgcgctcaaggcggtagaaaggggggcccgcgtcaccctgatcgagcgcggcatcatcggcggcacctgcgtcaacgtcggctgcgtgccctccaagatcatgattcgcgccgcgcacgtggcccatctgcgccgcgaaagtccgtttgatggcggactgcccgccacgccgccgcttgtcttgcgcgaacggttgctcgcccagcaacagggtcgtgtcgacgaactgcgccacgccaagtacgaaggcattctggaaagcaccccagccatcaccgtgctgcgtggctccgcccgcttccaggacagccacacgctcagtgtggaactggtcgaggggggcgagcgcatcgtgaccttcgaccgctgcctgattgccaccggcgccagtgcggccgtgccgccgattcccggactgcaagatacccccttttggaactcggaaaaggcgctggcaagcagcagtattccgcaacggctcgccgtgatcggctcatccgtggtggccttggagctggcgcaagcctttgcccggctgggtagccgcgtcaccatcctggcgcgcaactcgctgttcttccgtgaagatccggccatcggcgcagcgctgacggcggccttccgcctggagggcatcgaagtgctggaacagacgcaagccagccaggtggcccatgccaacggcgagttcgtgctgaccaccaagcacggtgaagtgcgggtcgaccaactgctcgtcgccaccggacgcacgcccaacacccacggcctgaacctggaagcggccggcgtgcagctggatgaacgcggtgccatccagatcgaccagggcatgcgcagcagcaaagcggatatttatgcggccggcgactgcaccaaccagccgcagttcgtctatgtcgcggcggcggccggcaatcgcgcggcgatcaacatgaccggcggcgaggcaatgctcaatctcgacaccatgccggccgtggtgttcaccgatccgcaggtggccaccgtcggcttcagcgaagcggaagcgcaccaagccggcctcgaaaccgacagccgcaccttgaccctggacaacgtgccgcgcgctctggcgaactttgacacacgggggttcatcaagctggtcgccgaaacgggctcgggccgactgctgggcgtgcaggcagtgaccccggaagcgggcgagctgattcagacggccgccctcgccatccgcgcccggatgacggtgcaggaactagccgaccaattgttcccctacctgaccatggtcgagggcctgaagctcgcggcgcaaaccttcagtaaggacgtgaagcaattgtcctgctgcgccgggtaaagaatgcgaggtgcaaacatgaacattaagactaatgaactcggcaggggtgacagcctgcgccagacatggcaggtgatcagcttctgggggctgcctgccgttgtcgcgacgctaaccattcttctggcagatcgacaccccacgctattcctggccgcaagcgccgcgctggcggtgatgggtggcgcctgcctggtcaatgccgcacgctgccgccgacttcactgctacctcacggcgccgtacttcctgttgctcgcgctcggcgggctgctggcttatggcttcgacccgcatggcgagcagttctccagactgtggctattgctggcactgggggcggcacccttgctcatctggctgcccgagcgcctggccggccgaaagtaccttggcgctccagggtgcggagaaggccgggagtgtcggtgatgtaggccctctcagcagccctgattggccgggaacgcttcggtctccgtaatagtgctgcgagccaaggacgttatgcgaggactccgtgtgcttttcggtttcgcctgctcttccgaacaaccgaacgactccagccgacaacagatgtgcacgctcatgaagttcattcaaagttttttggggcctcgcggccccagggacacgacattcgaggcgggcagctagttggccgcatgggggtgggtcggactgaaaagccctgatttaggctgcgaaggacgaaaaattgttagcgtaacaatatcgttaaatatcaatatgttatgcactactaactgttagcgtcattcagatacaacgacggctgtgtcatcgcgcgcagcgcggatgccaagccgcatgtcgccatgggagagccctacttcaagatacggaacaagcttcagcgcctgggtattcgcgcgttctccagcaactacgcgctgtacggcgacatgagccagcgggtaatgactctccttgaggagatggcgcccgccgtcgaggtgtacagcatcgacgaatgtttcgctgacctgaccggggtccctggtgacctggtgcgcgttgggcgcgagatgcgcgctcgggtactgcgctgcactggcatccccgtaggcgtgggtatcggcacttcgaagacgcttgcgaagctggccaaccacggcgcgaagaaatggcaggctcagactggtggcgtgttggatattcgagatccggcgcgccgggatcgattgctgcaggcctgcgaggttggcgatgtatggggtatcggccgacggatgaccgagcacctcagcacgatgggcatccgcacggcctgggaccttgcacaggccgacgcctggaccttgagaacgaaattcaacgtcgtcatcgagaagacggcgcgagagctgcgcggcactccctgcctggagctcgaggatgctgctccgccgaaacaggagatctgctgcagccggatgttcggcaagcggctgcatgacctcccgccgatccgcgaggcggtggccacctacgctgctcgggcctgcgagaagctgcgtgcccagggctccgtgtgcaaacgggtccaggtcagtatccgtactggcatgttcaatccagacgagcccaagttcgccaagggcgtcagtatggagctgccgtatccgaccgatgacacacggctcatcaccaaggcggcgtgcgagggactggaactcctctatcgcccaggcttcgccttcagcaaagctgaggtgctgctgcttgatctccgtcagccaggtgagttcactggtgacctattcgctgaggtacaaccggagcgcgcgaccaaggcaatggcggtaatggatgccatcaatgcacgctggggaagaggcactgttcggccaggcggtgtgcccgcggcgccagagtggggcatgcggcgcgaactgatgagccgagctataccacgcggttggacgaactatgggaggtgcgataactcgacattttttatgaacagcacgccgtacatgatgctaagctgatcccaagtctcgccgtgagcgctctcaggatcgatcttgatctcccgtctaatcctgacggagagccgttatagcggttgcactcaaaagaaaatcgccagatggagaaaaattcatgaggttattttctgtagcatggaataactatcggtactcgcgaattgtccccattctcctgactacagtagtcgtcggtttggttgtaacgctcctgtttgtaaaaggagcaacgatgtttatggaaggaagtctgctgtctgtggcattaagttttctggccttctgttttgccataagcttgttgtcaacgtggtggctaaaggttaaagagctttatgcaaggccggccgacaatttgtggttgtcggtgatcgcagtaatagtagttttcaccggcatctatattgattatggtccgaatgggaagcatgtgggagagactttagctctcatgccgggctacatgcttgatcagctagtcccaggttttacagacgagattaatagagctgctagagatactcgtggccactgatgacgaagatacctggcttgatcggcgctaatcaccactagctgacttcagaacttacagcaaaaagtaaaacaaaggccacccgaaggtggcctatgagttcatgctgcaataagttgtcgtgccaacgccatctccaccgaatccccatcctggttcaacgagtcgagacctgactcgggaacgtctcccgacgtgctctgagccacagcgatcttcttggccatcagctgtaagcaggtgatctgcgagctgccggcgtagccgaagaacaccacccgcaccgggtgcttctgcccgatccgccacgaccgccgcgcggcctgctgcaaggtgtacacgttgtaccccgtctgcaggaacgcgatggtcgggaagtccagcaggtccagcccggtcttcaccagctccgggttggtgatcagcacatcgatgccgcgatcgacctggtcgaggatccaatcctcgcgtcgagcggtatcgaccgaagcacgtagcacagccaccttcagcccggattgctcgagcactttcttcagcctggacgtggtgtcgcgcgtcccgctgtagacggtgtatgccagaaccttgcggcccttcgctttctcctcgaggcagaggtccaccagcgcctgctccttgggcatcaactgctcgtcgccgaagatcgctggcacgaaggccagtgtgtcccggcttcgcggatgcttgacgatctccggtcggaaacagcagtccggccaagccagcagcacgttgaggaccacgcccaggagcgtggtatctcgtcgcgccagagcttggcggagctccgctgtcagcgtggccgccaggcgctgataggccgaagcctgatcaggcgccatgggcacgtcgacgaactcctcctggtagtcgggcagtacgttgccaccgatatccttgagcttcaggaacacggtgaacggcaatacgaagcggtggatgcccttcgggccgaagccgggagccttcaccgtgcgtaccgagagcttcttgccccgcgcggtcttgtgcgagtcaccatcgcgttcggtgtagatatccttgagcacaccgtggtcgcgcatgaacgacatggctgcgggagccatgctgccgcgcgcgttgggccgatagccgtcctcgatcatgcgctgggtgaggatgcggaacaggaggtagaacaggtcgtcggcgtagccgcccatgagcgttccggtcagcagcacggttttccgtgccttggctgcgagaacgcccatggcctggccctgggccgaaccgctgttcttgtactcatgcccctcatccaccaccagcaggtcgaagtagccatcaggtaggtagcgcttgatgaactcggtcggttggtagccgccttcgccgaagccgaactcgatgttcgccatcgatcgctccatgcgtttggcctgccgatcgctgaagacgaagttgcccttggcgtccatcaggttgatgaactccgagacgttgtccaccaacatcgtggccaggaagtcctcgccgaagtcgttcagcaggcgctccgccctgaccgggccgatggttggaatccgacacatcgacttgaggatcgttgcgcgccggttgccgccgtcaggcttgcctggccggatcagcgtccagagcgccccacgacaggaggaacaggtacgtcgacggtcaccacgctcgaactcctccaccgtgaccaggttgccttccaggtcctcgaggacctggccgcaatccgggcacgcagcgagcagttggccgccggcggcgcgcttcttccagcaggcgagccgccaatggaaacccatccgcatccgcacgcggccgaggatgaagaactcctggcgtccgtcgtaggcgtcgcccatctgatctcgtagcttgagcagcttgagcagagtatctgggccattgagtacccagacgcgggcggctgggatggtctccagaatctcgcggcgccacttgtagaccaggtgcggcggagagacgaccagggtccggcgatagccggccgcgtgcatgaccgctgcgacagcgatggccatcatggttttcccggtgcccatctcggcgttgatgatcccggcctgctcgttacggtccagcagcagggcggtgatggcctggacgacctcggcctgggccgcgaagggcttgcgcttgagtcggtccatcaccaactggcggtgagcgttgtcggagccggtatagaccggggggttggagcgattgagcgactccaggagctcgtcgccgaactcgtcgatgaagtcggtcaggttgatgttcagggggaaggcggccagggcggccggttgggtctgagcgttcatgtgcatctcctgcaggtgaaggaagaaagcagggcatgcacgtccctttcgggtatcggcataccctgcagggtggagtggaaggaatcgccgcggagggcgaggtcagtaatcgctaggaagcaaaagcgtggttgagctgcggtctgcctcagtgatgatccagagcctggattcgccgccggcgtcgatgtcgtaggacgacagcagcctatcgccgaacttcagggctctctggttggtgttccagtcttcctggtccagcgtcccccaatctcccgccagatggcggttcagcaaaggcgctgggttgagttgaccggtttccaccaggtggctcacggcagcggtcattacgacttggccagggctgaacagcagcggttcgggggccggctcaggttggggctcttcagcctcttccgtggtcgcagccgacgagctgatggtcagcacgcggccctgattgaccgaggagggtgtcatttcccatgcccggatgatcgggatgaaacggtctgtgaggatcctcacctcggtgatgttgccgtcttcgtcttcggtgaattcggtcttgcggaccttgtccttgtaggtgtcacccttcacgaccaggatccggcccgacttcgagcgcacgacgccggaaatcgcgccggcggccaaggccagggccaggtgccagcgagacagctcgcggactggtgggcggggctgcagccccgcttgcgcgaagtgcaggttgaagtcaggccagagacctcgcagccgctggatctcgccggcgaactgctccggctccagggttactcgatagaagtgctccagctcgctggtggccggcagaaccacgtagggttcccacggccaagccgctggaatttcctcggccttttcctggcccgcgccgatcgcctgcaggcgagacctcacctgattggcgtccgcccgggccaggtcctgtcgacggacccggatgccgaagatcaccacctgtttgaaggtaggatccgcggctgcgtagatgcgcaggccggtgaagtggttgctcaaccagccagtcagttcatcgtccaggacgtagtgaggaacgatcaggaccatgacgccgccgtactgcagcaacggcaggcagcgctggtagaacgctttctccagacgccggcggccgctgccctggtactgcgacgcaccggagtggtccgccaccaggtcgccataaggcgggttgagccagagcagtccgaacgactgcctgctgatcatggtgtcgaaaaggtcactgtgcagcactcggtcaagcaagcctcgagcatggtcggcgcgctcgcggtcgtactcgacagcgagggcttggaccttgtcgcggccgaggatgtgtgctgcctcagccagggcaaccccctctccggcgcagggatcacagatcctcatcctgcccgacggggcgggagcgagggcctgcagagcgcgttcgagggtgacctcatcggtagggaagtagccgttgcgtgcaaagttgcgcgccaagcgcgggaacatgagggccatggggcctccttgagtctgagagggatggctcaggcttgcgcctgagcatcggtggtaagaatgctttcgcggatcagctcaccgagggtgggctcgagcacgtcgacccgcagggcgagtcgccaggcgcagacgttgccgatcgtcccgggcagggcggtcaacatctggtgctgggtgaggacctccattactggctcgcgccagtgctgtaggagggggagcggacaggtctccatcaccagcggccagagcctttggtgtggatcctcatcgcgctgcaggagtgcgaaggcgaggtgattgcttcggtcaggtgccgaggcgcgccgatcgaacagccagaggttgagcaggctgccgaacaacgtgccgcggaactgacgggtggtgcgtttctccaggagatcctggtttgggaagacaggtaagcggcggccgtccacgatgatgtggaaatggtcgatgccattttcttcccggcccagcgtcagcctggccaggaactcttgtgtcacggtgtcgcggccccaggccgaaagaaagaccaggttgcgctgctcgtcgcacacgcaggcgtcgacgtacaggtctgggcactcttcgatctggtagagcggggtgggactgggcataggaacctcctggaaggaggagccacgccgccctcaaggggcggtgaagcccctcggggtgtagtccaactggtgcaggggagcgtggtggctaccgaacgctcttggtgtgagggtcgaagctgagcccatcgtcttggtgcagcggcccttggccgttcaggaagacctggcagaggtactgatcgcgtagcgcgacagccgcttccgcctgctccaaggtcagcgacagctcctcgatgaacaggtcgatgagctcgtcgtcgccggcgacgtcgttgttggacagttggtcctcgaggtaggcgagggtttcctgggtgaggttggtgaacagtgggtgcatggtgtgctcctggtggtagacgaggagcgcccttgagggagcccctcaagggaagtggttggtgcggtcaggcttggtgttcttgcgtcagacggtctcgccactcctggttggtctcatcgtgagccaggtccaggaactccagcggacagccgtagtagaacgggcctgctttctccgggatggtcttgtagccccattgcccggccgagcagtccagcaagtgcagctcgatcatggtgatcgagtgaccggccggcttgccgaaatagaatccggcaaggtggaaggttcgttttacgacagtccaaagttcattgccggagactgcgtgtgccagcacctcggtgctgcctgcgaaggtactggttggggccagcagctcacgcagcaggtcttccttcgtctgatgtgagaaaagccatcccataggtgtgctcctgtggttggccaggtctccctgacgggagaacccggcaggggtgggtagggtgttgcttcagcgtgttgcgcgctcaaggcgctggaggagtcagctggttgacagagcaacgccaatagcagcagcgcttacagccattgcgctgatagcctggtgggtggaacaggttgcagtagcactccgggctgccgtgcggcgctcgtagtcatcgtctagcgactgattgaccccggcgttggctttgcgggtccacacttgttgtttgaagtcgagctcatagcccagcgcgccgagtcgcacacactgttggcgcagtcgcttgcggtcgaccgtggtgtccagcttgacgatttcgcctagcggccagaccgtcccgaacagttctacatccgcatctgtgtccagaggggcggcctgctttgcagaagccggagggtccataccgaaaggcgcgtcgtccccggttgcagcggggcgcagaggcttcgttttcgggggcgacttcgggggtgccgccggtgcggcagtgggttgctggatcgcggacacttcgtcgagcggatccacctcattgccagagagacgctctgcctcctcgtcgctgaggttgtccacgtcgtccagcgtcatactgtccagcttggcgcggatctcgacgaccagccggccgccggtagtgtagtaggagggacggatctcggtgatggcgaaatcaccgcggtactttccttcgatgtgctggtccaggagagcgtccttgatgacgaactccccgatcgaggtcgagagctttcccacgttgaactcgccattgcgaccgttgatggttcgaatggccaactggccgggtatgttgatcatggcgtgacctgcgaaaaggatgatcccgccgaagcgggatcgtggtgaggggagaactactcggtatccggggtgcccgggaggctttcttcctgcagctcgatgcgcaggtaggaaggctcatcggacggctcgactatcgagaggaccagcagcgcgagcgcgcggtccggcccctcttcctccttgtggtacaggtggaattggatgtgcttcgcggtcggctggagcgaaagctcctgccaggcggtttgaacgacactggccagccgggtgcccatctcgtcgaccctggcagggttggcgagatagaccaggcgcagccaggccgcgttggtgagaacgatcgggagtttgaggtacgcagcagtgtgacctgcgctggagtggttgttgagagaggtcatgagaggtctccgaatacgcaggcctctcccgcggggatgaggtccccgcgtgggtgggtaggatgcactccatcacttgcgtgatgcgaccgcgctgccgagtgctgtggcggtcttgggtgggttagcgcttgcgcgccggagccttaaaccctggctccttgggaggcgctgtcaacgacagcgagccaattcgaattcgggggctggcgggatttcccgccggccggattgctcaatcgtcataaagcggcaggcccttgagcgtgggcgcgaatggatcaagtaccaggagccgaatgtctgcttgtcccgcgaggtgaagcagatcgacaaggtgttcgtcgaggccgaaggcaagctgttcttgtcgaagagcggctgcggtcatctccaggatctccagacactcatccgtccaaggggtgttgtgcaagcgaaagcccacggcaccgtgctcgttacaccagaagagcgataccaacaccgagggcaagcggactggcatcttggtcgagaacctttcgtagaggctattccacgcgctgatgggtagatgtgtttttctgatctcccagcagcggttataaccgccgccgaacgacaggtatcgaacgacactctcggcttcggtcagtgagtattgatctccgataagcttttttctgccgtcctgctcaccgtagatgctgtaaagtacgtttctcactattccttggtgagggcatttttcaactctttcatcgtctaactcttggactaccacggcgaaatcgttattgaagtagcacagctcgcactgaaaatattcgtctgggaggtgctgctgggtttcatgcagagcgcggtagcacggtagattgttgccttcgtcagtgatctgcaggtttcgctcgatgcggaaactctcatagccgcgaataaacgggttgagttgagtcatgggatatctccggttgccgggaggcccatgcccttggaggctatggacctccaggtgagtaaggggcgccgaagcgcccaggtgatgtcgagttgttgcagttaacgcgataggtgttcttctttacgccgagccttctggtatcgctctaccaggccatagtattgaagtaccggtgatgtgcttgagtcgcagccatgctcacagtcggcctgcgccaaagcttcgattgcatcttgaattacatagagctcgatactgagtccggcatcgccaaattcatcaacccggcctttgcactggatgtactcgaacctgctttgtgcagcatgcactccaatgttgagtagagctgggagcctttctggatatgtgttcatggtgatttccaattcttaatcaaatcggagaggtcaccacccgacagggggatgaccccgtctgggttgagttagcagaagcacacagcaaaacgggtaaaaatttaatattcccgttgcgaccaagtgccgttgtctaatgcctgttgagcaagttcgcgggatgggtagtattcaaccgattcgcgcgaagctggtccttcttcatcaagggtgccgatataaaagccggcattggacataagaacctgcagcggcagttcgagacgaagatgggcgagtgccagctttccgtattgcatggtgattctcctttcggtaggaaacaccagtcccaaggggactgaggtcccctaaatgggaaatgtttggcggttaggccagggcagatacctgggaattgttgctggccaggaacagccaggcgaagttgcagaaatgcctgctgagcagcagctcgtcctcgacgtcggtgaggcaaacctcctcaacttccggcagggcgggcagatctacgatttggatattgctcatgatgatctccagataatggagaacaccacgccctgggggagatggtgccccccggatgggtatgcgatgaagagtggcgcatagcgtaggtagtgaaaggccctcgggatgagggccggtattcaatcaagcctgctcaagcagcggcttgttcagcgtgctcagcaggagctgcgggctcaccttgcggttcgccttggccttgctgggctttttcagcttcttccttcgcatcgtagacggtggtgccatctactttgatccaggagatgaagagcagccggcctttgaggcttgcgtcgggcttgccttgtttctcgcctttctggtggatgaagggatccgcccagatatcgccaatacggaaggaaatcagaaccttcttcttggcctcgactgcttccttgcaacggcggacaagcttttcagcctgggcgccgaccactttgcagtcgatgtaggagtattccacgctgtctgccgcgccatggagggctgcgacggttacggcgaggaacggttcacctcggcggatcggtacttcgcggatgcgattgaggtagccgataccggtggtgtgcaggtcgaaatatttggcttcttgggcttgggtgttgttgctcatgatggttctccagtttcgtaagcgaaagcggagaaacaccttgcccgtcagggaaaagtattccccgcatgggtcggtattgggaggtaaatctgagggagaaggcttccatcaacctgtggttgattgatcgcgctaccggaagctggtgcgatcttgggttcgatctacacggaagtccgtgtcgtagtctttcagatcatgactactgggggagggttgccgacaacgtcagcagctcacggggtaaaggatgggcaggggaaaaatgaatgtcaatacccttgaaatgaaaaaagcgcccagtgttgggcgctttcatggtcaatgatgacggggaagaatccgatgtttttggcaccaggtcttgacttgaggccaactgaaccagagggctatgccggagcagataaccaccaggctggtcatgatgatcatgccgaactcggtctgggacatttcactcctcctcctcggtgagagcgatacctatgagccagattaccatacccatgacgaaagcatatgccgtcagcaagcggtgctcgctgaggaatatacccaccaggctcgcggcaacggcagtggtaccgatttttcgtagatcgtctgcgaatgcagcacgcttcgatttcatggttttcctcgatgaatgccggaaaaccgtccccgcgggaaggtttcccggcagggggtggtgagagatacggatcagcaggtcagcggatcaaccggtgcgatcagttgatcaagggagcccagcttgagctccttccttaccggtgttttggccttgggggccgccttggccggtttggatttgcgcgcgcgcttgggcttttgcacttcgcgcgtgttggccagataccagtcattgaggttgactttcttcaaccggacgatcgccgggacgtcgctaatgtgttccagctccttggcggtcgggccagcaagcatggcgggcgcgatacgctggacgctcgacgcaaccggagcttgtgcatgcactacgaccggagggcgactgagcgctctgcggaactcacgcacaacactgccgagggcaaagccgatttcgaagctggtggattgcttggacatggtgtttctcctgcaggttgagggtgcggagaaaacactggccctggcggggaagtggattccccgctgggttgcggaagggagcttctatcgaccgaggccgaccgaccgtgctaccagaagctatacggtcttgggttggatcaacacggtgggctgtgctgcagcatttcggatccgagctgcatgagggcatgtcgctgacaacgtcagcagatcacgcgctcatcatcgaagcggggggcgaaagtgtcaaggtcaagcaggagggggagcggatgcagcgggcggagagcgagggcggaagagcgcggctggtagaaaccctgtcaaaggtttccccagccgtgtctggaaggggagtcaagtgagccacctgtggttgaatcgtcgatccctgggcattgatcgtctcgatcccatcacccggccattatcgtggcttggccagcaaacagtaggcacgcatccgcgtacaaaaggagccctgcgtatcaccggcgggccaccggcagggagaagaatcccgatgggtagcctgatggtcctggagcaggagcatcaggctacccatggagaggggaaaaggaggggccgtaacaccagtacgaccctttaatcaaggaaacaccgaacctcttgagaaccctatgtgcctttaaactcgctcgacacgagttgacggctgcatggcaagcaaaagaacagggagacacagggagaattctcaaccagatccgcacgccccacccggtgttgtagcgtgcttacggtttggcgatgaggcgaacctgcatcaccagggcgctactgatgaccgtcagtagccagcggggtgaaatcaaagttgatggcattatgtgttcagaaggccggtttatcaagcagcgccggggtttactggcctctggaggttatttgaccgcgaccaccgcgccctcggggatgggagcagggagcgcaatggcagtggctccgaggcggcgtgtgactaactggccgttgcgcctgacgccaaccaggtcggattccgtaccggcatccacggctgccgccagccctgccggcggcgaggcgatgaaggcgtagctggtgccggcggcgatgtagccctgaagcctcgctggcttgcggaaccaggccggtaaaccaagagcggagtccgccggcgaaccgctgaaaccggggttggcgtgtgcgtactccgccagcctggagcggtagagcagcaagctcctggccagggtgtcgacctcggccagctcggcgctcgaggtcgcgtggttgctttgtacactcagccaggtcccggtgatcagcgcgagcaccaggacgatccacatcagcggcatacggcagtccttgagtcgtggcgacctgctagttcacgcaggtaacggtgacgttggtcgagtcgggggtcttgtagggctccggatagttgaagcccgggccgatctcggtgatcaggccgaacgagtagttggtgccaaaggtctggttgaagcccaccgcgcagaatcggccgccgcaggtgatcgcgtagcggacatagtcgtagtacatcatgccgctgtcctggccgtgcaacgtacaccagtccttgatcacgcccgcagtggtattcatgcgcatggaggcggcggttcgcccccactttccgttctggcaggacaaccagagtccggtgctggtaatgccggcgagcccgttcggtgagcagtcggccccttcggtggccacgcctttgagctgcaggtattcgccgacttccgtccggccctcggcggtgagtttgcccgccttcatctcgccgccggtgtagacgttcttgttcatccaggagcgcacccaggtgctgtcgctcatgtaccagccgccgccccacttctcgttgtaccagcccgtgtcaccacgggtcctgaaccagcctccggtgtacgtctcgccggcgacgtcagcagtgccggctttcaccgtgccagtggctgtcacgttgcgcgcgctgatgtccgcgctggtggtgatgttgccgctggccgtgatcgcccaggccgcggcgatattgttgcctcccatgtccagcgtggtattcatccggttgagttcgggatgacccgggacggcattgcggtagaggtactcgttggcgatggcgccgtcctggaagaacagcgccgtcgccaggtgtccagcgccgggagcgctaccgaaattgcttaaggccacctgccaggctgcgccctgggcgatactggtgttggttttcgagatgaagcccccggtggctcccatgagctgcgcgatccggcggatcgagagttcggaagctacctgtccacccgtggtcacgatcagcgtttcgagctggttggccgccggcttgcgggccagtacctggtattgctggccgaagatgttggtgtcgcggaagcctgcgggcaggtaacgggtgttgcgcaacatcgggacggtgatcaccgccggggccgtggcgccggcgctggccagaaccgtgctgaagttgtccttcaggtacttctccgctgccttggccacctgctgttgctgctgggccgcgtgctgctcgtccaggccgtccaggtagctcatcaggaccgatatgccgccggcggtcgcgatggcgatcacgaccagggcgatcatcagttcgatcgagatgaatccactgctgcgcttactcctcatggtgttatctccacaggctttgcctggactggcgagcttggtcgtcctgcaggagatgagcctcctttcggcggatcttgtcgcgcatggacgggccatcgtcgccggtgaacagcagtggctcggcggtcaggcggcgcgaagaaccatcgctctccagcgcttggcagatcaccgcttggatgccttcggcaaccacgtcgtaggcgtttctcgccagtggctgggcgagcgtcaccaggcgctcgatcgcctgatgacagcttttcgcgtgaatggtggcgatcaccaggctgccggtcagagaggccttgcaggcctggtaggcggtgtcctcgtcgcggatctcgccaatcagcaccaggtcggcgccggcccgcagcgtgcgcagcagagcctcgctgtatccgcctgagcgccgtgaggttctgacctggatgcaccggccgagcccatgttgaccgctgaggttggtttcctgcgggtcctcgacggcgcagcccaccccgcccagctcctgcaggcgggccaggagcagagaggcggcggagctggtcttgcctgtcgccatctcgccgcagaacaggaccaggccctgcagctgcggatccatcagcgcggaaaccacttcgctcggatagccgatctcttggaactcccgcaattgggcggtcgaccggcgcagcacgaatacgctgccactgaacgcgtcctcgaggagggtgacgcgaagcagaacgccgtcgacgatgatggcgaactcaggatcctgcagctcctccagcgtttgcctgcagagctggagcagttcctgggcgtgcgactcccactcgcgaggcacctcgactcggcgcgcgccggcgccggccagacccttcacgtcggcgaagccttcaccgaggtaaaggtcgacgaactgagcctggatgattgggttcacactcacgaactgtaggtccaggtaatgctgttgctgtcgctgctgcaggcctgggtcgccgctgcggtggtcacttcaccagtgatcgcggatccgctgttgatcttggtctgctcgaatgtgttcttcgcgatcttggtggccagcgtgatacaggcgtcctggggcaacttgctggtggtgatcgagaagcccatgccggtggacgagacagtgaccgatccgccgtagacgttgtagacgacgccggaggagacactcatgttcttcggcacgccgttgattgcgatcaggctcgggatcaggttggtaccgctggagccgtagcccgaagaggtcttcagggcacgtgcgttggccgcaatgacgctgatgttgcgctgttcctcgttggcgttggacgaactgaacatccctgccgctgcggccagccccaggccgactccgatggcgatgatgatcagcacgatgatcatctcgatggaaacgaaaccgccctgcgtcggacgggaagtgcgttgcgtagtgctcatggagcgctccttggtgaggtttcagtggttcatggattggatgagctgctgtgcctggtaggcgccgagcaggaccaggatcatcagcgcgccgatgaagatcagggcgaagttcttcaccagcccggcggccagctcgatctgcttgaggctggtctcctgccagcggcggctgaacttgaccagcgcttcggagaagcctccccggttggcgaggatgcacaggtactggatggcctgtcggtcggggaaatcgtgaccggcgctgcgaagggcgactcccgagttctggcccaggcccacgccgttagcgggcagctttccaagcgctgcttcagccagggcggggagatcttgatcatgctggccaggctgtcgtaagggcgtatgccggcgttgagcatgaccgccatgttcagcaggaaggtggtgccttggagcatgcggtagatggaccagggcggcagcgtccggtccagccagacccggcctttccagcggtaggtcggcaaggtgacgatgaccaccaccgtgagagtgatgacggcgaccagaacgtagataccaggtcctgtgacgaagctggcaatggcgttgagcgtggcgagtgggccggtccaggtgactgggtcggaaagcctggccaggctggggaccatgcgataggccacgatgcacagcaggaacaccatcatggcggacagcgccaaggggtagagcagcgcctgccagatggtggcgcggatcctggcctgggcctcgaccagggagacggcatcgcccatggcctgaaccaggttgccgctcatctcgccggcttcgatcagcgctcgctcctgggcgggcagatacagcgccatggcggtggccagacgcttgccgttggacagccccatcagcgcttcgcgactggcaatggccaccggatgaaacggatgctgtccctcatgagcgaagatcttgtgtacctctgccacagcgtccttcagcgggaccccgttttcgagcagggtggacatgctttcgtagaactgcaggcgttccttgcgaccgaactgcttgctgtagaaggcgaactgcaactgctcccagaagccccccatcagcacgcctcctgcgagtagaagctgtcgtcgagcagatgctcatcgaagtcgagtggcccaatgaaatcctcgaccatctgcgggtcgaacatgccctcgttgatgcggcggatggcgtgggcgtgcttggtgatgccctgcatggtcttgacccagtagttgcgtgcctcggctgggccgcctttggcgaacacacgcatgaaggccagggtgggcagcaccacctcggcgacgatcgagcggccgttgaccccggagccacggcaggcctggcagccaggccccttgacatgcacctgggaaacatcggtcaagcgctggacccgttcgaccagatcgggcgcgagctggtcttggtggtcttggaagcgcactttgcagtgggggcagagcttgggcagcaggctctggttgatcaggccggtcagcagggccggatcgaacagcaagccggggtcgacgcccaggtccttgaggcgctggacaatgccgatcgcgctgttggtgtgcagggtcgaccacaggccgtgcccggtcatcgcgccacggaaggcggcgacagcggcgaagaggtcgcgcacttcgccgatcatcatgtagtccggatccaggcgcatgccgttggcgatgcctgcggcccaggcctggcgttctgcgtctgggtcagtggcgtcatagaccagtggggtctggttgatgccttcgccgcgaatgcggtattccggtggatcctcgatgggtcaggatatgcttggatccgccatgcagcttatcgagtccttccatggtgaccttcaaggtcatcgacttccctgacccggtggggccggacaggatgttgatgccgtaaggcatgcgcatcatgcgatcgaacagcgcgttctgctcgggcaggtagccgagctgctccaggctgtcgaggccggtatcgtcgtagagcagccgcaggatcatcaggaacccaccggcgcgcgggcgggtcgcgatccgggcgccgaacaggttcagcttctcgacgaaggcctggctcatccgcgcgtcctggtccagttgcggcttgaaaagcggctcggccacgtcgcacatggactggtagatggttgcgcaaagttcgtgcagttcctggctgcggtactgctcgacggtcttcagcaggccgtcgacgcggaaacggatcttgctgccggtgccggcgggactcacgacgaaatgcacgtcactggcgcgcagctcagtggccttacgaatgatcttgaccacgcgctcctgcatctgggtggcgcgctggccatcgctatcgaccaggccgtccatggcgacggcgcggtagagctggtgaatggtctgcaggtcggtgaggttgagctggtatcggaagccacggcgatcgagacggtcgatgaacgacagaacgtgaatgtcgttctggtggctctccgatagatagagcgtgccgtcggcggccagggccatgatctcctgcaggtgcttcgagacctcccactcgccaccgtcggcggtgagcagttgggtcaccatggagggctgtacaagcgcggcaatttgaaggttcgtcatggcggtacctactggatgaacggctgcggtaccgccccgggcagcgccggcggaacggaggcgccttgggccgaggaggcggcttgggtcggggcaacgctggagaagcccacgggcacgcggttgccgtccttgtcggtgagtacgacctggtccagggagatcgactcgacgcggtagttgcccggcagctccgcgccgctggcggcgtccacctcgtacccgcccgggaacaagaatgtggcagtcatcttgccgccggcgccgtagatggtccgcaccaccggcggaaccggctgcgtgatcgtcggcggcggcgccggcaccggcatggcgaacgtctgcccctgggcgctgacgacctggccggtttcgcctttgccctccagttgccgctgcgccgtggccagacgcaccttggcctcggtgaggatggcctgggcctggatctccgccagttcgccaacggtgccggcgcaggcctggccggacgcgaggaggaagagcacggccacggccatgccgatcggctcagttcgcatagatttctcctgtgacagtccagtccaactggctgtccttgagcgtggtttcgaggttggtgatgcggaccccggcggcgggcagcccctggaaggtcaggtctgccgggagcctggtctgggcgctgaaggtgaatttcttccaggagggcaacaccacttgctgctccgtcgccgcttccgcgccaggaaggggcggagttgtctcctgactgatcgacagcttgggctcgacaccctgacggtacagatggctggtgagcgcctgcagcacgtcgtcggctggctgcagcggctcatcgctaccgatggcgactttcaggtcgaccttcaggcccgcggtgttgccgttgtcgatgacgaaggcggggcggtcggcgaacaggtgctggctggccgctgtcaggtcggctgccgtgctgttgccggtacggtggtaggtggcgaccaggaccctgccgtcgcacttgctggattcgaagagccagccctggatcgacagcgacagtacccccgttgccttgctacaggcgcgtagcatgtcctcgaggtcaggcatgagcgtccaaggcttctgcaatgacgccaggtccagcggctgcttggcctgggcgttcttctcggccagctcggcgaggcgcctctgctcctcgaggagcgcggcttgtctggcgagctcttgctggtgggcattccataggtagtaggcggttagcgacccgcctaccaagcaaccgagcagggccactgccgtccactccctggctgacaagccgaaggtgagttgccggaggcggtagtcgcgccgcaggcgcttcggcgcgagcagttcctcgatgtcgaagtccttgacggggaattcgaatccttcgggaacgaagacctgtgcgtttcgaagcacgccgcgcgtagagagcttcctgatccggtccctggcttcgtcgaaggtggtgaccaggtcctggccggggacgatcgcgccatcgagcgtggcgaccagtgcgtagcggtcctcgtcgaccttccagcaggccaggaagtcgccttcgaactggcctgaaagcgccgaggccagggagtacatgcccttgactgcgccttgcgacttcgaaacgaagccggcctggatcactgtcggcgaatggcggatggcaacgatgtccagatgctcttccttgcccagcttgcgcgcttccttcatgtactgccgctggctggatagcggccgccagaacaggccgctgacgaacttgttgccgtggtagctcaggatcgagacgtctggtccacggctgccgaggtcaggcttctccatggttcagcccagcacgacgggggtgatcagcaccacgatgacctcgcgtttggtattgcgggtcagcccgccgccaaggccgaagaatccggcgtcgccggtgccgaccttgttggtgtcctcggtggtctggtcgaagccggagagcaccaaggtctcgccgctgcgcaggcgtaccttctggtcgaacagctggatgtcgtagctcgggaactgggctttggagtctccgctggtctgcatttcgaacgtcggccgggaggtcatgttgatgttgatcttcagcagcatctcgccgctttccatcacgaacggcagcaggctcatgttgtagccgctggtcacggcgcccgggattagcgaggtggtactgccgacctgggcgacgttggagatctggctggaggccaggtagctgtcgtagcggccgatctggatcggcgccgactggaggttgagcgtggtcacggacggggagcggacggtcgagacgcggccctgctgggccagcgcctggaccatggccttggatcctgcccaggcgctgttggcggtatccaggatgctcacggagccggagatcgcgctttgatcgatgcccggcatggtgttcttcaggccgatgccccacttgttgttgagcgacttgtagaccaggttccagtcgatccccagttgatccttgtcggtcagggcgaccgagagcacgttgacgttcagcagcacctgcttggtgatgctctcgttctcccggttgaccaactgctggacgcggttgaggacctctggtcggtcggtgacggtcagggtgcccgtggcacgcgacagcgacatgcgtcccatgctcggcgtcagcatcgagttgatgctgttctctatgtcgctgaggatcgaggtcttcagctcagagctggtggtctgcttgctgccggagtcgccgctgatgccggagctgccattctgcccagtggatccggagccatccccgctgatgccggcggccgtcgtcataccggaacgcacggtggagtccaccgtgttgacgtcgtcgaaggcgtagatgcggaaggtccgagtgtccaggtagtagaactcgacccgtttctcggttgggttgtagcgccaggacacgccggcgcgggcggcgatgagatcgaggaatccgctgaccttgccgttccatttgatgttgtacagcgaccgcgggccgtaggacccgaagctcgaccccatgctgccgccggcacctagggacatgccgttggcgacggaggcaggaaacagcatggtggccatgtcctggccgccttggatgggtggcggggcgttgctcgcgcgctgctgaggttgcagggcgaaggcggccgggttcagcgcgtcgggcgtgatactgaccgccaggtggcattggttgatgacttcctgggcggcctcctgcagcgacgctgcgcctgcagggcgccaggtcacgatacagtcactggacaaagtgtgcgaaacgctcaggggcttcgtgctgacccagggtttgtcggagaaaaccaccgtatcgcggcgatccggtcgggtgttgcgcatctgtgctgcgatcgtcgacgcggaatctgccgtagcttcgacacgatccgccgactcgttcacccgcgtgaccgagcaactggccagtgcggggatcaggaggcaaggcaagaggttcttcaggggggcacgcatcagttcttgcgctccttgatgatgatcagggactgcggccggctggcgttcaccaggaagggccgttcggcagcgtcatacagcgggaacagctcggataccgcgtcctcgaaggagccgtggaaggtcagaggagcttcgatcggatagttgagatccagcggctcccagcggacggtccagcgtgcgcgctttgcccaggcttccaaggtgtcgcgcagggttgatcccgtttcggctgaccaggactgtgccaactgccggctcggctccgctggcgtgagcaccttgaccggaggggcggaagccacgctggccggagtgggcggcgtgggcttcacggtggaggccaggggcttgatcggtgccgaagccgcgggaggagaagaagggtggccatccttggccggtgcggctggggggagcacagtggtggattcaggcttcttggtcggagcggggctggttgtgatcggcgccggcgttggcaccgaggcgaccacgacgggcgactccagcgtgctgactttttctgtggaggagagttgcgctaccgccgctggagttggggcagcgggcttcgcatacagttgctggaccggtttcggcctcggcgtcgggggaagttgatagcctgggcgaagcacgaagcagacctgtcgcgccacttcgtcgaccttaacctgccaggctggaccggagaggacctggagggtgttgcgcagggtcatggggccgagcttgtactgagccgccggcagcggccgggtgtagaggatgttcacatgaccggcctctgccgggcacagcgagtaacccgagcggctcatcacgtactgcatggcatctttgacgctcgggttcatgctcgacgggatggtcacgtcgatgatctgagccatcaggtcgcgctggccagcgtccggctgggtgctgaccagggtgtagcgcccgtagcgcacgacgggctccttctccggctgtacgccattcgggtacaggtccggtgagagcaggtctggattgcggctgctgtcgaaggcgggcctggccggctcagccttgtgggtcgtgcagctggcgagcagcaggcacagcgtgagagtggtcaactgcctggtcattgaggccccctttgatgatggggcacacaatggcaggccaatcgccatgcctcagcaggaaatactcggcggagggccagggcttttttatccagttaggcttgcggctaaaagcgcacggtttccgtcgacctgctctggctcgatgaggtcctgggctacctggcgtttcgcgttgagcagttgccacagctgctcgtcgatcgtgccctcgaccagtgggatcttcaccaccaccatgcggagctggccgttgcggtacgcgcggtcctcggcttgttcctgctgaccgggagtccagggcagaccgaggaaaaacacgtagttcgccgcagtgaggttgttgcccgtcccggcggccgccgtggtgcagatgaacacccggcagtcgggatcctgctggaagcgatcgatcgctttctgccgcttggtgagcgagtcattgcccaccagcgtgacgcagccgagcccggcctgctcgcagagttccttcagcgcagccacggtcggcttgaactcgcagaacaggatcaccttgtcctcggcgtcgagctcgctcaacaggtccatcgccacgcgaactttcaccgtttccaggtaacgccgcagcgcgccgagtcgcgcgaagaccggtcggtcctcgaggcgcagcacgtcgtattgctggcgttcctcggtggagagggccaccttcagcaactgccgctgcttgcccttgaggctgggcagcacatctttgcgcctgcgcagcatccagtcacccagctccgcccgcagactctggcggaactccgggttgccggcgaaacggtcgcagaactctttcagcggcagttggccgatggggtggcctgagaggcgcagcagggtgtgcagctctgtctcgcggttgagcaccggcgtgccggtaagcaggtagcggttcggcacttgggcggcaatgtcgaaaccgtgccgcgtgcattgcgccgtcggttccttcatccgctgcgcctcgtcgatgaccatcacggcgaagcgcgaagcgttggcgacgaaggggctcaactgctcgtagttgacgaggatccactgcgcctctggggtgtcctgctggatggccacggtggccgagggatagacctcctggatctcccgctgccaattgatcagcagggtagccagggtgatgaccaggattggtctgcccgccgcgcggatcgaagcggcgatgaccgcctggcgggtcttgcccaatcccatgtcgtcggccaataaggcgctggttctctgcagcagatgagcgatgccgtcaggctggtgggccagtagagagtagccctgaagcgccgcctcgatatcagccgagctgtactcggtgcgctcgatctctggcaccgcggcgaggtagatgtcacaagctgactcgtcctccagggatagcgctgccggttcctgctgtggaccgccgatgctcatgctgggcagctcggtcgccggcgcgaagctaccgtcgctgagcagctcctggacggtatccaggatctcgaattgttcctcggcgaggccaagctccaggatcaggttgctgcggagcagctcagttgtggcgtcgatgcgccaggagctcgatgggcgcaggaacaccccgcgcatccgccgagccaccgccaccacaccgggatggaactcgcctgacagcaagacgccgccctcggccagcggcgcgatgcgcagcagcaaaccccaggtgaaggcctgtcggtcaagcgaggcctgtgcagattcgaccatgccgctgaagtcccgccaggactgtgagtggaggcctccagcgagctcggcgagtcggttgtacagcgagtccagttcgggcagcaacttgcccttggggacccgccagtagcggtgcaacggatgctcccgggcgctgatgaagaagccggacagttccagcagcgcgcggttgctgcctgcgatgtaggggatcttcaagccgaagtcgtagccgtcgaagatagcccgctgcagaagcgtcgaaggagtcgcggaggtacggttgaccagacgtggacggctcatcggttttccaaccgagtgagcagccacttcgccgtggcttcggcgaggcccgccttccagcgaccatcggcgaagcgcgtcatgtggacggtcatgtcgggccagttcaggttcgtcgctatggctccagagcgaatccgttccatgaaccagcggtatgcttggccggcaggggagtcggccggcacgggggcattatcgaattcgcgcaattgcaccgtggaaaggtgctggggattccagggcctacctagaggctcgccatgctcacgcctgagctccaattcggcagaggccagtggacgaccagcctcacgtactgagagcagtcggcagtctcctcggtaggcggcctggtcgtagctatcgatgcaatgggccagcgcgatatgttcggcatagagatcggcagggcagcggagctcggcgatctgcaggccattggggcaagcgataaggccgacaggcagcattccctcccaggtggtgtactcgtcggtgtcgaccagatcggccaggctgctctgtactgtggcgcgcagttccctctggacctggtggtagtcgtccaccaggttgccagcctgtcggtaggtacaatgacccagatacgccttcagggcactgcgcgcctgccgaacaacctgtgagttcccctggtcgagggcggtatagaactccttgatatctctcagccgtgcagtgattgcaagccatgccggatcctgccaatccgacgggcagccgttgaagagccggttgtagtcaggcttggcgttgtgaatctgccaagggatcgcattgtaggctgcatagaatgctgtccattgagcgcgagtgatcggccgccggttaccaagcgatgctgccagtaggagagcatgccatcccgaatgtcggccttcccgtttgcgatggaagagagctcctcccgcacggccaggactgacgtgactaagaaatcgaatcgaggcccgtggcgcctgaaatagccaggcgaaaaagttgatgaccgaaatcccttcgtccgcgacctgcccaagaatacggcccatatcgagataccagtcgcatggcatggtggtggcctgcggtcgttcactgtcaagcagggaaaaggggcaaggaaggaaatggcggatgctctcgccgttgtcgttggtcgtcgtgtggggccagactccctcctcgcaatccaccagtagcggcgtcaagatcggctgagccttcagcatttgcagccggcgcctctggtcgccttgagccagccagttgtagagctggggcgagaggcaccgaaccgagcggatggcgaacagcaggttctggtccacggcctgtctgaaggttcgcaagaccgctccgatctgcttcaagtagaactggcgccttggtgcgtagtagcgcttgttgctgtggctcggatacacgaggcgacgttgaagtccgagatcgaccctggccatctgtgtggctaggtcgtgcgctcgcttggtgtacgagctgagtacagcaactgcgtcgtcgaacgtctgaaggcgctgtagcagcttcaacgccccggctggggacggcgtgcttgcagggatacgatgggcaggattgcattcccacgcaccgatcagttgaccgtcgaacacctggagcagaggccctgcgcgcatgatggtgtaacgcacaccattatccgcagcgacggtgatgcaccagcacctggtcgtagaggtgctgcgcaggtagtgacggatgaacttggctcgagctgtccctgcgagggagaaatgcgttgcccaggtattggcaacggcgagctgccgctcgctgtaacgggccagggatggatcctgtagtggctcggtgggggaagtcctatcgggtggtgccacgcgcatgctcctgtgaaagcgagcagcactgtggccggttggtgtgcttcggatcgatgggaaatgttcaggccacgcggcctgaattttcttgcaggtctgaccgcgagctcagtctgagatgagacatttcagccttgccttccagcctcgtggttgctcttcagatggttttctccgaatgaggtcgatgagttgctccctcgcttgggcttcgttcagggatatttcctcctgggtcttgaggttcaaccagttcaatgtggtctggtaggtgtccatcttccagcctgcagtatcttcccgacccaactgcacgcgctccggatgaacttgtacaggcagcccttgtagcaggacctgttgccggagttgcccgtacaggcggtagaaggcgtcgttgacctggtagtggttgagcgtcacgtcgtggagctggctcttctgctgctcggccaggaagaatcgagcaatacaggtgcggtggttgccgtcggagccgacgtagaaactcaagccatcgagtgtgttgtagtggatcgcgggcctgcgctccgttggctgcaggtagtagctcgggttgtccaacaaggcctgcaggtttcgctgcattcgcttgccgccagtgaggaagtcgagccaggaccttccccggtagtctttgcggtcggtacccacgacgcggaacacattgatcgatcccgtctcggtccagtagtggctttgaaggaaggcgtgcttttcctgggggtaggcctcctcccacgacagcaggacctctgatgcccatgctggcggttgctcgacttgcctgcgcacgaagtcgaaattgaggttcctgtcggtactggtctgcatgttcatgtatttatctatagcccgcgcgggttgtcgaagtcaggttggccgtccttggtggggtagctgactttgcagccggtgctgcgatagccgctgcaaccccagaagtcgaagccgcccttgccggctttctttcggtggaccaggggcagaccgcacttgccgcagaggaagtcactggccggcgccgtgggagcgctggcggtagagcttgctcgcgggtcgccctgtgcgctggggtgcgcgcgcagcgtctgcagctctgactgcaggagctggtagaactgctggaccacgttcatgtaggtgtcctcgctgttggcgatccggtccagggcgacctcgaggttgcgggtaaagtcgaggctcaggaagctgaagttgtgctccaggagcgctatggtggcctcgcccagctcgccggggatcaggcttcggcccttcatctgcacctggcccttgtcgatgatgttcttcacgatagaggcgtaggaggatggccgaccaatcccgcggcgcttcatctcgcccaccaggctggcatcggtgaagcgtttgggaggggtggttttcttctccaggacctcgccgctgtagaccttgagtatctggcctggctccagcgccgggatggggcttgaaggcgtttcgttcttttgctcctcggcatcatcgccctgcagcaattttctccagccaggcacgttcaacagcttccctttggcgccgaagcgcagcggctttttgtcggggccgacgcccaggagggtgatggttcgcactgcgtacacggcagcttcgatctggctggcaagcgcgcgaactcgaatgagctggtacagcgcctgctcatcagcagtctcaccggcggaagcggccatccagtcggtaggggtgatggcggggtggccttcctgggcgtcttggtccgctttgaacattcgctgttgctctacacacttcagccccaaggctttggcgacagcacggatatccggcatcgagtccttcgaaatattggggttgtccgttcggtggtaagtgatgagcccctgttcatacagccgctgggcgactttcatcgtcttgtcgggtgaccacttcagtgcatttccggctgccatctggagcgaagaggagatgaacggcgccggaggcatatcggtttcttcgccatcaatgcaggtctcgacgatcacattgcgtatagcccccaccagttctgcgagttgacgatcctggatatacggaaattccttgctggcaaacgtgggcactggatcccactccgccttccaggtgcggccgtcgctgggcgaaacgaaggccagttccaccccgaaatgcttgattggtgtgaaggcgcgaatctcccgctctcgcaggaccaccaggtacacagcgacggactgcacgcgcccggcggtggttggcttgcccatcacgcgccgcaactctggcgtgaccagataccccaccaggcgatcgatgacgcgacggcattcctgcgaggcgaccttcgggaggtccaggcgacgcggcgagctgagttcggcgctgatgcatgacttggtgatctctttgaaggcaacgcgcttgtagttcttgatcccggcagcctggagtatgtgccagccgatgctttcgccttcccgatccgggtcggatgcgacgtagatctccagagctttctgctgcagatccttcagccgtgcgacggttttttccttgcccgagaggatctggtagtgcggtttgaaatcttggcccacgccgacggtgagcatctgcggatcctggccgtgaacggggaggtctctgatgtggccggctgtcgcctcgacctgccaggtcacgtcgggacgaatggaggggagaagggaccgcagctttttcagcttgcccggggcttcaatgattacaaggtgcatcggcggagtctctcggaacagtcggtcgaactgtcgcggtcagagagcgggccaacaatgagaaatgaacggtgcgttgttgcagttttcgggaggtgctgtagagcgggatcgatcagaaatcgagctgctgttgctgctcctgggcaaaccctttcaaccaggacgcccgcattgcaggatgactgtaggggcagtcgaacacccgtagccctttccgcgcggcctcagcaccaatagcccgtacagtccggtggggatcgttgaagtgtcgtctgtccagcttgtcggtatcggtcgctctctttgacacactgcacctcgtactggtcgagatttccgattcggaagcccttgccaccagagacttcacgaacgggcggccaaaattaaggatgctggtttatcagcttttgccggcataactgttcattgcggttgctccagtcgctggaatgcttgtcgaggctgcgggcggcgaagagaggttcttgccacctgcaacttcacgagtgggcgcggaaaattaagaccggcgtttcaccgtcgcgtcggcaatgccttgggctatcctgatgaaggatgcgcgatcttcttcctccataagcgccatgcactccagaactgatatctcgtcggcgctgaggggctgcctggtcaacggctcatcgcgatcccgaaatgagcaatgtgagcctgcttggtcatctttgctgttcatggcggagtttcctgcggggggctttgtcgaagctgcgggtggcgaagagtggtgcttgccacccgcagcttcacgaatgggcggccaaaaattaagccgcctgctacatggggatgtcgtcgtcgaaggcgctgtcgtagtcctgctgcgattgcgcatcctgctgagcaggttgctgcgggacgttccgagactgttgatgctgggtcgattggccgttggtagacggcaacagggtgacctcggccaggcgatgcggaaggatggaaatgcgcgaggcttcgaccttcagcgcctggacttcttcgcctgactctttgtcgggccagcggtccataatggccctgccttcgaccttgacgcgcatgcctttcgtgaacagttcggcgaagcgctgggcatcctgatgccaccattcgacgctgcaccagaagccgccgcgatccttgtagccaccttggccatcgggaatcgagttgtcgaacatcacgttcagtcgcagcaactgccgcgggggattgttgccgttggggaagctgcggtgctccggcgccgagccaatgttgccttcccagaagacgggggtagccatgatgaatctccagtcagtggtggttggtgctctgctgcagtcggcccatgaactcggcctcggcctggcccatcttttccgcgcactcggcggcctgcttgccgatggagtggatcaggctgatctgcatgttgagggtgatgcgctgcagctccatctcgtagaggtcttgcagcaggtattccggggtcttgtcctggcgcagcatttccgcccacaccccgacgcccatccgccgggttgcaatgtgctgccagcgaagaaaggtggtgcgggcggatgtgcgctgctcgatgagtcgggcgggcagaagagtgaagggcgtgcgacgaacctgggccagcaatcgctgggcaagttcaagcaatccctgctccaggacttcgcactgctccgccaactgggccagctcccccttacctttaaaaggctttaaaaggccttttagtgaggcactgtgttgcagcgcctggaaggcagtttgttgcagtgggcggaaggcactttgttgcagagcgccttgctggtccttatcgagctgccgcattccgatcagtcctcgagctcgacacggtcagcgtcatcatcggcatcaccgtcagagcggcctcgggtgatcggcggagcgaagttcgagcgtcgggtgccctccaggatgtcctgtgggatctcgccgaacttctcgtacatcttccgcgcggcttcggcgcgagcattgtttgcggcgaagtcgtcgcgagtggcccccgagaactggtagctctgggccagaccaaagaggctgcgcagcaccgacgcaccttcgtcgagccagacctccatgtcgcggcgaccgaccagtccgacgtgctgggccagcaggattcgacgggcgagttcgtcgtagttggtcaggagatagactgccttgaagccgagagggttggagatgaacaacgggaccttgaccggtgtgacggacaggttctcggagatatcgagggtcgcgggcagcttggccatgacgtcatccagtcgctggtcgatggccttgagtgcggcttggcagctctcgactttctcttcgatctgaaccagccaccagtcggagtacggatcgtccagtgctgccccgcggtgcatgcgattcacgtaggcgcagaagccggagaggccgaggatgctgtgcttggcatccgacttctgccggcctgtccagatgcgggcggcgtgataggtgtgaagcgtcagggcgacatcgctgcggagagagccgatctgaagccgatgggtttcagccatggtgcagtgttcctttatagggaaggggttcggccacatcgtgctgatcggggtaggagcgcgcagtaggaaatacatggttcgccgcttgggtatttccgctggcagtgcgggttcatcatcatcccgcttgcggctcatggaggttggcttccttcagctcttggccccctcaggggcgttgtctatcgctacgtcgacgcaacttttgagcttgccgagcagctcgctcagttcctgcagctccgtaaagtcgataggccattcatcgttgtcgttgaatagggttgccagccctagcagccgctcgaattcgagttcgtccataggggcatacacgattgagtcgcacatcttttcggttcctattgggtgagagaagttgatagccgtcgtcggcaccgaggtcgatccttggcagagtggtgcgggccgcaccacccagctcaccgtcggcgccgaggccaggacctggcagagtgtttcgggccgcaacacccagcttgccgccggcgccgaggccaggacctggtggagtgttgcgggccgcaacacccagtttgccggcggcgctgaggtcgatccttggcagagtgtttcgggccgcaacacccagcttgccgccggcgccgaggccaggacctggtggagtggttccagtggaaacactcatcttgccgttggcgccgacttgggtatctctaccgttggtaatctggttggcagttcatgtagttggctttgttgcatgaagctccccacatcgctttttctgccatttcaaagcgatacatctcaaccgtaatggtcaacacggttagtgaatacccgaacacggtcagcattaacaacagcctgagttctcggtcgttccacgcatctgtaaaaagtgcagaaagaacgagaacgaccaaaaagaaaggggccatgctcaagaacattgtttgagttcctcgtgtgtggtgatgtctcgctttggcagagtgtttcgggccgaaacaccaaacgcaccggcggcgccgaggccaggtcctggcggagtgttgccagtggcaacacccaactcgccgccggcgccgaggtcgatccttggcagagtgtttcgggccgaaacaccaaacgcaccggcggcgccgaggccaggtcctggcggagtgttgccagtggcaacacccaactcgccgccggcgccgaggtcgatccttggcagagtatttcgggccgaatcacccagctcaccgccggcggcgccccaagggaaaatcaccttgctcgacagtgagtatttcatggctcatcaccccgctcggatggcacgctcaatccgtgcctgggccgaatgaggtccttgagccggctgaggacctcgctccctgtccgggtgtctccctttggctgaatctgaggctgtgtaggtgtcgtggggcttgatggtgccggagcacgactggggcgttccgctgctgggatggttcgttcagccgcttcttccggagcccaagaggcgttgaacttgccctggactgcacgctggatgagcgtcatgaggtagccgaaggggttaccgacagttccttcccgcacatcggtgccgccactgctcgatgaccggatgacgcagctcctcggacaccccgtcggagcgcgcttacggcttggatccgttgctcggcctccagtccgttcaggagatcctgccagttcggatgtgcgtcctcgcgtgctcgcggttgtactggctttttacatacagaatcttgtttgtatgtatacgtactatatgagttcggcatccgaaccaagggtgtactcggcggattctgtctgggttcggcatccgaactcagcggtaaagcgcattgcttgccgctgatttcactgagttcggcatccgaactcggggttgaatgaggtagatcgggcagagttcggatgccgaactctgccgctggatccgcttcgagctgactatcaatagcccattgctggtggttcaagcgcccctcgagcttctccagatgggttgggagccggcgaccaacgtccgggtcatccctgaactcccgccatgtgatctggccgatttcgcgtatggctcggttgctgtcgccggtggactggctcagcaactgcatgtagtcggggtccagctccagggcttctgccggggataccggttcgtcgtggaggatgtagacgttgccttgtacttgcccgttgaggtcgttgcgcaggcggcggccgagactgagccagcgtgtcaaccgaaggaccttgagtgccttggcgatggtttcgcgcgaggcgatcttacccggctgcatgccgagataagggcgtagttgctcgtatgtagggaacgcggtcagcccgtcgtcgttgatgagcaagcggaacacttgccagcagtttctctccagcggggtgagtcgtttatccagcagcaggcgccgaggaacggttttcatgcgggttgccgctgaaaatgatgccggaatattgttgagccagcggttcgccgctttcggcagcaagccgcttcttatacaaatgggcctcgagatgtcccgaggccgaatccagcagtgtcgagatgggaaagcgcgacagcctcatggtgctgtgtcgccttccgactgaaccaggttcagtagttgttgacgttctgtctcagcgttcacctgcgttgttgcggatggggcagagtggggcaggtgtgagctgacgctagcgaggtaaagagtggattgggacttttgcaggcccgcctggctctggctcgatttgccagacggatagagcccgtctttcagccagctctggatgagagaccaaacaatggcgaggctgatgaactctgggctgtcttgttcgattccggcgttgatttcctcggtgaggatcatcgcgatatccagcaactccatgctgtcctcaaggcggacctggttttcctgcatcaggtgctcccagcggaaccatatctggcgctcgatctgttcatcgagctgccgccagcggccccgtcgggggtgtatctccatgatcagccgcttgatcgcagtgtcttccggcgacagaccgaagaagctctgaatcatcgtggtggtagccccgagtttgagagcacgctcaatttgcagctcctcttgctgagagcgctcggctgtggccaggattttctccatgacgtcgatgttcactctgacgtctacccaggaaaccggggtattggtcaggatgctcatgacggcaggctgttggagctgagccaggatctccggccgcagccccatctcggcacaacgcctgagctggccgttgcgcaggtggttgagcacctgcgtcaggaccgcttcattgatcaacgacttcgacatgtcgatccctccccaaatcgtgcgaaatcactggtcggtagctgcttgctcggaggcggccggcggcagctcaaggtcaaccaggcgtcgggcaagacgaatgatccggaacagtttcaccagggcttcgtcattgagacgtcctgcctggctggatggctgatcgcctgtggtgggttggccccagcagcaactgagcgaggccagctgagaattgaaactcgcccagggcgtcgcggcaggtctgctggtcgtgtgagttcaggacgacttggacctggccgctgagcgcttgaagcagcgtcatgaggtgcagcgctgaatcagtaatctcagggtcttcattgggttcgcgatacgtgtaacccacaccgccctgaatcctgacgatctctcctggggcgccgacatgcagagcgatctcttcagccagatcagcgatgtgctgtcgcaggatctcgggggtatcgatcgaccgctcgatgtaccagagatcggtgatcgggtgcaggccgccgacttgcactgggattgcctgcagagctgtttcctcgaagacaggtagatgttcaccctcgagagcggccagccgttggcgagtctgctggatctttgtggataccgggctcacgatatgacctgccaagagctcagcacgctcctcgtcggtcagttgctgctgttgtacaggtagtggcggagctggcggggtagagggattacccgggaggctattggtcttggacgtttggaggccggcagcggggctctgtgattgtgcttgtccagtagtcgacgcagcaggattttcctgccctacggctgggattccaggtggtgcggcaggtgcgggcaggtcgaccagagtgccgcggcgctgctcctgctggccgttggtgatctcgagcaggatttgatcatagcgaaggcccaagggacgcttcatctggtcgatgagttcgtcctggaatcggtcgaatatgaattcgtcagggctactgtcaaagattgccagcgtgtcctggaacagcatttcgaagtcgataccctcgccggcatatagacgtgtccagcaggaggatgccgactttctgagtgacaggagtttctcgatttgcggtttaccgagccctgaatacagcatcacagggatggctggaagcagtatctcaacggcatccagcatcctgctgatgtgtgagggtgaaacaggatagccgtcatcggtgagcttccgtgatagctcgcggatgccgaccggttcgcccttctcctcctcataccaggctttcgctttctgaatgcccacggctcgctcgatgaacttgaggtcacccttcagatcgttctcagctaggtgaccagtcagcgcgatgatttcgccgcgctgcttgtcccagggcctgaacaggcagttgaagcggaagtaacgctcgtcgccggtctctttgtagagctcgttgagaatttccaggcgagtgttgccgccgttgcgaatgcggtatttgtcttccccggggcgccgggtcaccggtggtggcgtatcgaggcctcggtgccggatcgactctttgatctcgtcgaatttggggttgcgagtggtccgggggttatcgtgccaggggaggacctggtcgagcgtcaggaccatgggcgtgtcgctgaccgggtccgacagctgctccagaaccttgggcggcgcagtaaaaccaggggcaagtagccggtctttcagatcttgcgggttgatcttggccatactcatgcctccgccacctgacgcgtgttcgccgccgccagctctgcctgcaggcgctggttcttggcgaagagttcgtcgaccattcggtttgctcgcgcgagttcttcttcgagcgcgttgctgcgctccagtcggtagacgatctcgctgttggccgagcggtggttatgcgcggccttttgcttgagctgatcgcggagcccttgcggcatgcgtacaacaaacttgtcttctgcgtgtttgcggctgatcgaagtaacgttcttcatgttgttctcctgctgatcgctcagtaatgagcggccatggtctggaatgagggcgatggagacgcattgccggccttgaagaagtccagttgtgccagcccctctagcgcagcgctgtttagccagaggcactcgattcgctctctggagccgtctgcataggcgtggcggtcgactctgtgccaggtgctgtagagctcgtcgtacagtgggcaggggtatccggaaagcaccaccatgccgccgaagtcgcgatcgccctccaggtactcaccgagccagccgctgaacgggtaggccccggactcgccctggaagaagccccaggccttgttcttggcgttgtaactttcgttgaggtcggccagcaggttctcgatggcctgggagtcgcccagctcggcgtcgcgcgcgtggagcacggccggggtgccgtcgggcttcttctcgatcaggtggacgatggcgtgtttgataggcatcagaaagactcctggttcagggaacgctgcctgtcggctcgacggagcagggcgcgggcattgagctcgccgcgtgcgtcgcttggcgtggaagaaatgaagatcgaggcgcagccgatcttgctgagcttcaagtggccgccggcggagcggtcgacgctccagccttcggcttgagcgaaggccaccagccggcgaacgctttcccgggcgccgcgaaggaaactacgcatccgtggtctcctcgctgttgagctgcagccaggtctccatctctgcaagggagcggggaaggctatcggtggcggcggcatccaggaggcgtttcaccagcgtctgaaggctgcgacgatcgttctgtcggctgcaggccaggtcgtcatgcgcggaacgcagcatgcggacctctgtgcgcagttgagcgagctcgtcctcagccggccggtaagcggtgacgtcaggcatcgtgcgctacctccttgggatttctacaggacagttcccagcggctctcgatgcgcttttcgtggtcgcctgcctgtgccggcatacgggtgatgtaggcgttgtcctcgccgaacagccgttcggcaaggcgggaggctgccaccttgtcgctccaggtgcaggtcgcacgctgcttctgaatggtattggtccagaagccggcgccatcgaacttgacgatgcactgataggtctgggacgccttcatgattcggcctccttgctgagtgcatcaccgacctgaacggccaccagttcgggcaactccggctcatgcccgggatagttgttggccaactgatgcaggaactcacgtgcggcgtccttgctgcctgcaatgcggaacaccgcagtgaggtgctgggagtcctgagtgccgcagcagaggtgtgacatcaagctcaccttcagcgagcagctgaacaggtggcgagggatccataccgaccagaagtaggccgaaagcagttgccccggagcacgcgtagtgaccaccagagtcccggcctgggtggtcgagatctcgatgtaccccagttcttccagctcacgaagctctcgctccatcgaactgggcgcgaccgtgctctcgtcccgcgaaaggcgcgagatcacttggctgagggcgtccagctcgatcggattgaccccaacttgattggcatgaacaaccgccgagtcggtgaacgcggccgaggcgtggatactcggaaaacgggcttcagtgttcatctcggatagcctccaattgatgaacgtcgtagctcccgcagcaggggcagaccaacacctcggcttctccttccggggtgttctcggcggggagaacctggcgcaccaagtggtgtgggtggtgctggtcacaattcatgcactggtgggtgaccaggtgctgggaagtggtcatgcatgggctccttgccatgtccccggcgccaagtcggcgaagcgggtctggttggcgatgaaggcggtgtggacggtgccgataggcccgttgcggtacttgccgatgatgatttcggcgatgcccttggcctcggtgttggggtggtagacctcgtcgcggtacacgaacatgatcacgtccgcgtcctgctcgatcgcgccgctctcacgcaggtctgcgttgttcggtcgtttgttcggccggttctccaggctgcgattgagctgggacagggccacgacggggcaatccatttccttggccagtgctttcagcgagcgggagatttccgatatctcggtggctcggttttccaggcctgggcagcgcatcagctgcaggtagtcgaccaggatcagtacggggtggccgtacttcctggctgcacggcgaaccttggcgcgcagctctgtcggcgtcaggttgccctggtcgttgatgaccagtcggctgccatagtcgtttatgcgctggatcgcgacggtcagcctgggccaatcctcttcttgcagttggcccttcatcagcttgccaaggtccaggtggccgagcagggcagcaagcctgaacagcagctgctctgctggcatttccatgctgtaaacctggacagacttctgttggtcgctctgcagcgcggcgtcgatcaagttgagggcaaacgacgttttgcccatcgagggacgggcaccgacgatgatgagatccgacttctgtagtccgccggagagctcgtcgagatccttcaggcctgtcgggacccccgttaccgtcacgttgttgttgaagcggtaatcgatggtgtcgacgatcttcgcgaggcccttgttgatatcgacaaagtcggacttgtgctgatcttggccgagggcgaacagcttctgctcgatctcctcctgaacctcagagggatttgcctggtggttcgaggcggtcctggtgcagtggtgcccgagagacatcaactgccgcaggtgcgcccgatcgcgaacgatctgcgcgtaagcctcgatattggccacggagggcgtgttgtcggcgagctggccgaggtaggccagcccgccagcttctggaagatcttcgatcgcttccgacacagtcacgacatcaaacggagcatcttttgcggccagctcgctgatggcggtgaagatcagccgatgctcatgccggaagaagtcctccttctgcaactgatcgccgacaatgtcccatgccgcgttgtccagcatcaggccgccgagtaccccttgctccgcctcgacggagtgcggcggcgtaagttccagaacactcacttcgagtcctcccggccgatctgcagagttcgagagagcagagcgagtcatcgggaacctccctgctcgagcgcgacctgaactcgccggctgacgccgcggtgcaggcgagtgtttttgccgtgctcccagcctgcgtgcagcgaagcctggtcataggccaggggcttcgtcggcgctgccggctccaggagtttcagctccggatggtgtagttcgaggtaggccttgatggctgcttgagtcgactcgtccggcctgccggcaaagtcacgtaccagcgaacgcactgcgagaagccagccttcgacgaagagcttgctgcgacggcgcttggtcgacagcttgcagcgcttctgttgagcgacatgagccgagcgcgccgccaccagttggtggtggagcgtagagtaggcgtgagcggctagctcagggccgatccctcggcccatgaacttgaacgtccagcccgctggcatcgcgtatgccgccaggtagtcgcagccgaaggaactggcgcagatcccggccagttcatgcagccatggggcaggagagcgcctggttcgagtgggaacgcacgcggtctccaccgtgtgggccgagatctccgcatcgctgaggtcgaactggcgcttcaggatcgcggcctggcgcaatgcggtttccgcctcgttcggcgtggcccccttggcattcgcaagggccatcagcttctcgaccttggcaaggactttttgcttgtccattacgcgccccccttgcagcaggttgagccctgctcggtggcggagcggtccaggcgctcgatctcggctagcaccagggcgccggcgcgtaccaggttctcgcgcgccgacttaggcttccaccactcttcgtcccagggccagaacagtgcagagccattccgaatgccgcccggccagtcggtgccgatgccgccggcatggagtgcgtagcagccggctgcctgggcgatctggccagcgctagcgtcgtcgttgctggtatcgaagccttcgacggtgatctggcgccggcgctcggcctgtacatcgagccaggcctgcggaacaggggagaggtttgaagttgggtaaattcggtctgcgacctgccgtacccggtcgacaatagccagggctggtacgttgcccagtgcgacctccagggcggcgagcaggttggccatcaagaactgctcacgctcgtccgcgtggctttttgcgcttgggcgcctgttccagtcgacctgtgctgaatacctcgctgttaccgggtctggctcgcagtaggacggcccgatgtgaacctggcagtccaggcattcaatggcacagttccaggcatcggtgtcgagcagctcgggttccagcgttcgaatgttcgtgctgctgcagagcgggcagggcttgagcttggggacactcatggcctgcctccctgcccgtcgttggtgctgggcttagcttgggaggagccggcggcgagcatggcgtgtacctcgctgattgcatcattaaatgctgcagctcgctcgggatctccggcatgcgacgcacagtcctttaattgtgcgatcagcttctcagcgtccagcaccgcgcagtgctgagcctgggctacaggggcgccgcccagcgcggcttgaacggccatctcctcatctacggtgctgaattgcatcaggccgttggtgctcagtttgcgcagaagcatctccagctccgcgaccctagccagggcggcgtcgcgctgattcaaggccttggcacaagcctcgctgagcaggcgctcatgctgttctgctgccgcatcaaaatcgattgggctgaggctctctgcgaggggcctcacgtactggcacaccgggccgttctcggtatcgtggatagacagcacgaaccaaccggagccttcgggccgcgttgggatccactcgctgtatcgttggtccgatcgtgcagagtcgtagaggcgaggcgcatccgactccatgaagacggtctgcaactcaaggccaagccggcgcagcgtttcctgcgcttcgttggaagagcagttgtcggccaggtccggatagttcggatgggtccagaagccgaactggtcgcgctcgaccaggtgggcttgaatcataggcttcatgccaggcccccctcgctcatgccaagcactgcacttgcctctgcggccagttgctggccttccgggctaggcgagctgccgacgaagagcatcagccgctcgatcaccttcacggtgtcctgggagggttgggcgaactcggccaggtgatcgattgcagtcgcgatattccagatagccctgttcatgtcccgctggatcacgtggatcgagctggcattggccgcgatggccagttgcgacttcgtctgcaacagtaggtcgtgggcgatttggagcagggcgttctgcaggggctgtccacaggcacgctgctgagcgcgaaccggagcgacaaggccctgcagcatcgcagcaccttcagcctcgaccagcagattgtcggaagcaccggcggcagcgcctgctttggccatgtagccttgcacgtaggcgtcgaactgggtctcggcgatcaggctcaggatgaggttgttgcggttctggaggttcatatgaggccctccggagccgattgcagagcgtctgtccagagctgaagggtttcctgctcctcgctggtcagagcgatctgtgcggtgcagtcagcgaccttctgcttgatgacgcgcaggcgctcctcgacttcactgccatcgtcgtaggcgatttcgtgagtcaggtggctaatgaagtcacatcgcaggctccccacctgactagcgaaatactcggcttcactgcgccacccgatgagctgcttgggacgctccagccagcgtttgagttttgagtggagctggtgcgtggagtacaggggatcgaacaccttggcccggttgtagatcaacgcgatctgcaggatttccagccgctcttcgagcgtatttcccggaagcgggtagttcgaggcgaccagttgcttggccaggcgctcgcgcagctcacgccgcttcttggcctgtttctcgtcgcgatcacgcttttccttcgcatgctcgacctgctggttcaccgagtcgagcaagcgcgcagcgtcttgtaggagctgcttttgctcgaagctcaagtagcaacccagcttcccgaacaggtcggtaccgccaccagtcagcttgcgtatttctcgcgcagcgccggtcaacttggcctgttggctccgaaggtcggcggcgctgccgaacttgttcagttgcagcacaagttccgcgtcgacgtcgcgggcttgggtgataggaggcttcgccatgtcagcgccctcccttgaccagtgctgctaccgcctccggcgtcagcgcgaggaagcggtcagtccactcgggaaagacctcgatggccaggttacggatgatttccagcgcgggcgctgatgtgcgattcgagggttgccgcgtttcgaggcggtgcgctggtagcccgcgcgatgctgcattgcgaaacacgacggcatccgggacagtcgtttcgagtacagaaatatcctgatgctcatcgaagatggcacgcacattctcgtgaatcgcccgggagtcattggtctggtccaggcagttgatgacgatctgaaccttggggatccgcatgccgaggcgctcgtaggggcgcagtccatcgagcatttgcatggtgccgcggttgaactcgcgggcagtgagcatgttgggctgcaggggggaaacaaccaattccgatgcgagcacgaccatttcgagtaaagcggagcgcgcaccttgggtgtcgatcagcaccaggtcgtagccctgtttcagggacggcatgaggtttgccagccggagccggccatcgggcgcctggagcagtaggttgttgagctggttgttctggtcgttggaaatcacgacgtccaggttggggataatcgtcctggagatgatcctcgctgggtcagttatgttggcggcgagcaggtcgtagatgccgccctgggcgacttcaggtagctcgtagtacgaagatagggagggctggacggggtccaggtcgatgaggagggtcttcaggccagcatcggcgcaaaatgcaccgaggttggcggcggtggtggatttccctacaccacccttggtggatacaaccgaagtcgctttcgcattcatgtctacagcctctaatgtggggtcattagaggctgctggtgtgaaaggtggctgggtagaaacccttcctagagaaacctaggccaattgtcttttaaccaattggtcgtaggtt

SEQ ID NO: 2 - DNA, 44302 bp, Pseudomonas aeruginosa
ctagatcaagggcttacgaagcattcgggggccagcaacaggcctctacgtaataagcgacgtaacaagactagccatgctagcgcggtcgcctgcgccttagcagacgtggcagagagagccggcgcaggtgacagggcggcggcagacaaccaggttccaacgcccgctccgcctggcaacccctcgttttatgttgacccatcgaaattgggtaattttggtaattcgctttcagaactgacaattattcctttaaattcaatagcttacagaatttttttaaaggtaataatagggtaattttgaggtaatcgaattacctttgtgctgggtaagctcgccgatttatgaaccccttataaatcaatggcttacaaaaaaattacctttccaattaccctaaattacctttcaaggtaattgctgaaagccagtaaccacgcggcatacagcccgcttagaaccccaaattaccgaaattacctttttccgaggggtcaacagaaaaacgtgcccaggaaggccccttgccgccctcagaaaagggcctctggtgcagggattcgcagggatttccgagttcggaaatcggaaggcagcgcccagcctgagccgttggcggcgctgtgcagaagtgcagaaaaagaggtctatttagagcggaggcgtggcggggggacgactgcgcgcgccagaccttgcacgcttcgtcttggacggacatactgtatatgcatacagctaaatgagtgcaacatcggaagacgcgaccattcggctgaactcccagtcaagccacttgactaaatagttgacagtccgatagcttccgtccattttgagaaacgatccctacggataggggagagaggtgacacagtgatcttcagcgagcaaaaagtggcccaaatggcggcgtactttttgaaccgtcgaggtggccgcatggcctatctgaagctcatgaagctgctgtatctggcagatcgtgagtcgatggatcgctatagtgcgccgatttcagatgaccaccatgtgtccatgacccatggaccggttctgtccaacacactcaatctgatcacaggccaagtggaatcacccgcatggcgcagttgggtttctcctgacgcccgctatcaagttagcctaagccgaccagtaacagatcgggacgaacttgatgagctttcagatgcagatatagaaatcttagagtttgtctggaacaaatttggtcatatggataggtggcaaattcgtcagtatactcatgatgagtgtgctgaatgggaagaccctggcaatagttcaatgccgattgatccgcggtcattgtttgtagccttgggacacacaagggaacgagcagatgcagaggctcgcgagatttttgagcgcaaagctcttggaaggattgtatctgagctaatctaatgccagggataatttttcggaagggaactcttctaattctcagcggccctgtagaccatcttcatatcgtgatgaatgaccctgtttattctcatgagcacggatgggatggtgttcttgccgtaaatatctcatccattaaagatgggatatttcacgaccctacttgcgtgttaactcctggttgccaccccttcgtcgtacgcgacagttgggtggtataccgcgaggcggtagtcatgcgatgtgagcgtttagaaaacaaataccaggcaggtgaaataagagagcatgatcctgtaaatgatggcgtttttgatcgcgttcgagccggcttcgactcttccagaatggtctcccctaaaatacatcgtttcatccgaaaccatcagatatagctagaaaacgtatcccctaactggagtccgctgtgccacaaggtgatcgcgacctagtaatgtttgaagcccatcgagatgcttcgagtaaattcgatcattttctgcttggcgccacactcgccacttgtggttatttggcacaaacaaatccttatggcagagtaggctacaacatagaaaccatgtatctagtttcattgattgcacttgctctcagcgcatactttggttttaagcgcgtagagtcaaaaatccaaatgcaccttggaaacgcaaaatatctagaaatgaccggaaaaattcaccccgcgatacaaggtgaatttagagaaatactagaaaaaatgtcagaccgcacagcagtctggtacagattgcgaaatggctttcttttctctggcttcatagcctatattcttacaaagatattctcctcctacctaacttagttactcttcaccacttcaaacctattaaaactaataacttcatcacccaaaagttcattgacctgctgcaagcgcgcctgcatcggctccagttccaagctggcccagaccgctgccgcgtcgctgatggatccgaacccaccagcgttctgcggcaccacccccatcagctgcggatagacccgcagaccggcgagctggtcgtcgcggctgatgttcttgatcgagccgaactcgtccttggccgcaacctcgctgaccggaatcaattggatcccctccttcttcccgttcggcgcgtagacgaacaggttgcggaagttgcccggccccttcgcggtcttcagcgccgtgcgcagcgcatcgatgtcttcctcgttctgtgcggcgtcggtcatgtagaggatgaagccggcgtggctgccgttgttgtagtacttacgccggaacagcgtggccgactcgttcagcagggcgctctgcagggcgcagaaccactccggcactccgtagatttcctgattgatgtcggcctcgcgcagttggatcacgctccccttctcgaattcgtgctcatccttccagctgcgcacctggtagaacgtctccagatcggtgccgcggcgcatgtacttggccagcggcgcctgcagcggcatccgcgtacccaggcgagaacgaggctgctcaaggtaggccgagccgaatgtcagccaatccagggagaactgctcgaacgtcgcccggctgagcaggcggtgcgggatgaaggtcttggccagcatgttgcgcttgaacttcaggcccgactgcaggtaaacgctcgatcccaccgccttggccagcccctccatggacagcggcggctcgtaccacctcccgttcgaccagcactcgagatagtcgaggatgccccggccgtcgagcaccggcatcgggtcaccgaaggtgaaggcctcggcacggccgccctggcgcgggatgaactcgccttcctgggcggactgaactgtaaccggctgctggcggcggtggctgcgacgtttgctcatcagaaaatctccatgcgcccggtattcgcgggggtctgcccctcgagcggttcgttctgcaatgcgtggaatagcgcccaggccagatcggcgtggccggtgttgtcgttgcggccggcggtgtaggtgaactggcgcccaccggccgtgatggtcttgcggatagccatcagcgcctgggccaggtcggtccagccggcatcgaattcgaggcggccgttcttgatcaccgaccaggccttcatgaccaactgcgtcttcacctctggcgagtagctgaaggtgcgcacccccgggaagaactggcgcaccagctgcgcgacgccagaccccatgccggtggtgtcgacgccgatgtatgtgacccagtagcgctgggtcaccttacggatgaactcggcctgctcggcgaagtccttgccgcggaactgatggcgctccagcacgcggaacttgccgcccggtaccgccggcggcgccaccaccactagacccgcggtgtcgcccgtctcggcggggtcatagcccagccacacctggcgatcaccgaacggccgcagcgcgaacggcttgtagtcctccgaccacaggtcccagctatcgaccatgcatggctgcagcatggtcagcggaaaaatgctcgcgccgtcgtcgacgaactggcacatcagcaggttctggaaagcctcggcgtcgtactcgagacgcagctcctcgatgtcgaacaggtcgcagccacgggcctcggcatcgaggatcgtgacgatctggcgccagatgcggtcctcgcacagccgcccttgctgcagggcgtcatgacttacgtcgatcttgatgcgatcggcggccggcttgcccttgttgaagcgctcgccagtccagaatgtgtaggcctcatgcgccatcgagctgggcgtcgagaaataggtccgccggtagcgcttctgcatcgccataccgctggcgaccttgttcagctccttgaacttgaacgtccagaagaactcgtcgaagtagaagttaccgtggtagccctgggcagtccgcgcgttggtaccgaggaagtgcagttccgcgccgttcggcaggatgatcgggtcgcccttcagttcgacacctaccgcatcgcgcgcgaaggcctggatatacgccttgaagatgtgtgcctgggccttgctggccgacaggaatatctggttgcgccccgtttccagcgcgtcgatcagcgcctcgcgggcgaagtagaacgtggcgccgatctgtcgcgacttgagaatcacgcgggttcgctgattacccgcgcggtaccagtctttctggtagtcgaagcaaccgtcgaggaaggcctcgaccagtttctcggtcagttcctcgctgatgtcgttacgcttgggcttgcgcttgggaccttcgttacgcttggcaagctcggggttcaggtcggtttcggtaccaccgccctggtagcgctggatccgcgcctggcgctcaagctgccgatgcagcaggtcgatttccttgtagtcaccgccggtcttgccgtccttcaggatcaactgaaccaaccgggcttccagggcgcccccgatccgttctacgctgtcggcccggtcccatccgtcgcggtccttccatgagtgaagggtcttgtccttctcgcccaggtgatcggcgatgtcgcagacacgccaacccatccagtacaggaatttggcctggcggcggttgtcacggatgggaatttcgacggcagcgttcatggcgcagatgctgccgcccaccctcgcccctcagtagcgccgccccttgtagctccgccccctacaatcccgcgtgattgctgggccgcgcgcgcgtcccgaacatgcccctcattgccatgcaccccgcatcagccgcattgaggactcccggcatgaagaaattccgcagcaaatggttccgcatcgccgtcgaaggggcgaccacggacggccgcaacatcgagcgcgactggatcgagcagatggccgcgcagtacgaccccaacacctacggcgcgcggatcaactgcgagcacatcaagtgggcctggccggctggtgagttcggcgcctatggcgacgtgctggcgtgcaaggcggaagagatagacatcaacgggcagaagaagcttgccctcttcgcccaactggagcccaaccaggcgctgctggaactgaacaagcagcggcagaaggtctacacctcggtcgagatcgatcccaagttcgccgacaccggcaaggcctacttggtcggcctggccatcaccgactcacccgccagcctgggcaccgaggcgctgtccttcagcgcaaagaacgggaccctcgccagccgcaagaccaaccccgacaccctgttcagcgctgccgaagagggcaccctcgagttcgaggaatacgaggaaaagccctcggtcggcgcggcgctgttcaccaaggtcaaggaactgctcaagggcaaggaagcccgcacccaagccgagttcggccaggtcggcgaggccgtcgaagcgatcgccgaacacagccgcgacctgggcgagcaactcagcgagcagaagaagcagacccagcaactggccagccagttggacaaggtcaccaaggagctggcggacctcaagagcaccctcgatagcacccgggaccacagccaacagcagcggcccccggtcaccggtggcggcagtgtcgccctgaccgactgctaaccgtcccccgccccggtatccaaaggaaaagcaccatgcgcaacgaaacccgcaaacagttcgacgcctacctggcgcagctcgccaagctcaacggcgtgaactccgccgtccagaccttcgccgtcgagccgagtgtccagcagaagttggagcaacgtattcaggagtccagcgagttcctgaagcagatcaacgtctacggcgtcgacgagctgcaaggcgagaagatcggcatcggcgtcagcggcaccatcgccagccgtaccgataccaccggcgacggtgtacgcaagccgcgcgacgtgtccgcgctcgacaatcagcgttacgagtgcaagcacaccgacttcgacaccgcaatcacctacgccatgctcgacgcctgggccaagttcccggagttccaggccctgctgcgcgacgcgattctcaagcgccaggcccttgaccgcctgatgatcggcttcaacggtaccagcgccgcggctaccaccaaccgcgccgccaacccgctgctgcaggacgtgaacattggctggttccagcagtaccgcaacaacgctccggcacgggtactgaaggaagggaaggccgccggcaaggtggtagtcggcaacggcgccgacgccgactacaagaacctcgacgccctggtgttcgacgtggtcagcagcctgatcgatccctggcaccgccgtgacccgggcctggtggtgatcctcggccgcgagctggtccacgacaagtacttcccgatggtgaacaaggaccagccggcaaccgagaagatcgccaccgacctcatcctgtcgcagaagcgcatgggcggcctgccgccggtggaagtgccctacgtgcccgagaagggcctcatggtcaccaccctgaagaacctgtcgctctactggcagatcggcggtcgccgccgctacctgaaggaggtaccggagaagaaccgcatcgagaactacgagtccagcaacgacgcctacgtcgtcgaggactacggcctcggctgcgtggtcgagaacatcgaagtcgcggagtagatgacatggccttcagtcccgccaaggcgcacttcctgcgcgtgaccgccgctcaagaggcggcggccactgccccgcaccagggcatggaaggcgcgaacgcctatgagctgcagctcgcccagctgtatcaggatcgtagccgcctgaagaacatccagtccggcgaaggtaaggcagcgctcaaggtcgagttgctgccggcctaccagccgtacatttccggcgtgctgcaggccggcaagggcgcccaggacgaggtgatcaccaccgtcatgctctggcgcatcgatgccggcgattacgccggcgccctggacatcgccgactacgtgctcgcacacgacctggtcatgcccgaccgcttcgcgcgtaccgccggctgcgtcatcgccgaagagatcgccgaggccgcgctcaaggcacagaagaccggcggcagtttcgaccttgcgaccttgcatcgcaccctcctgctcaccgaccaggccgacatgcccgacgaagcccgcgcgaagctctacctcgccgccggccatgccaccctggaaggcctttctgtggagagccccggtcaacccgggcaggtgcaagccggcatcgatctgctcaagcgcgcgatccagctgcacgacaagtgcggcgggaagaaggatttggaggccgccgaacggctccagaagaaactgaccgcctctggcggttgaccgagcgtaccccgcgccccgccggctcggggccgatctgccaggtcctctccttcctgagcagtgacgccccgaccaccggcgacctcaagcgagcagcagcatgagcggattcatcgccaacggcccggtcccgagcgggcacatcaacagcgatcccttctggcccaccatcgagctcgagcatgtgcgggcgaacctgcgcatcgactccagcgtcgatccggcgcgcctcgaagtcgcggtcattgccgcggtgatcagcgtcaaccgcgagctgcggacctggcgccttgagaagagcgcggccggctatgccgaactcgccgaagtgccgtccgacaaggtgcgggacacctccgaactggtgcagctgtatctgcgcgcagtgcagtctgccaccgccgccgaagtggccgagcgctaccgctggtacgacaccaccaccagcggcaacgacaaggcccaggacatcgcaaccaccatcgacgactaccgccgcgaccagcgctgggcgatccgcgactttctcaagcgtccccgcacaacggttgagctgatctgatggccgccgtcgcgatcgcccaccagaacgacaccgtcgaggcgctgtgctggcggcactacggtcgtacggccggcgtgaccgaggcggtcctcgaggcgaaccacggcctggccgaccacggccccacccttccccctggtctcaaggtcaccatgccggacattccgacggccgccccggaacggcagatggtgaacctatgggactgaccactttgcaaggaaccaccccgcatggctgacctcaccaccaccgccacggccggcgccatcatgggcctcggcctgggcgtaacccttccggttgacggcggcatgctgttcggcgccctgctcggcgcctggctggccaccggcacgaagcaggacctgaaggcctggtcgcgcctgctatcgctgatcctgccgacctgcgtcggctacctgttcgccgatgtcgccctcgcccgtgtgccctggctgaccaacctggccttctctgccttcgtctgcgccctggtggtcattcccctcagcctcaaggcggtcgcctgggtcgacaaggtcgacttcgacgacctctggcgccgcatccgaggaggtcgctgacatgctcatgactaccgttccgttgatcgccgccctggcctacatcgccgccgcgctgcgcctggtctgctaccagcgctgcggcgctcgcttccgccgcagcgtctcgttgctcgccagcctgctcggcgcatccatggccatctgcggcctggaaatcctgctctaccgcccaccagtcagtatctggcacgccatcgtcgccgccctgctgtgcctgctgatcttccgttcccgcggcaacgtcgccgccctgctgaggccatccgcatgacccttcgatatggtgatcgttctcaagaagtccgccagcttcagcgtcgactgaacacctgggccggcgccaacctctacgaggacggccacttcggcgccgccaccgaggacgcggtgcgcgccttccagcgctcgcatggactggtcgccgatggcatcgccggcccgaagacactgtccgccctcggcggcgctgactgttcgcacctgctgcaaaacgccgacctcgtcgccgccggagctcgcctcggcctgccgctggcgacgatctatgcagtcaaccaggtcgagtcgaacggccaggggttcctggacaacggcaagccggcaatcctgttcgaacgccacatcatgtaccgccgtctcgccgcccacgatcaggtcaccgccgaccaactggccgcacagttccccgcgctggtgaacccccgcccgggcggctatgccggtggaaccgccgagcaccagcgcctggcgaacgctcgccagatcgacgataccgccgcactggagtcggccagttggggcgccttccagatcatgggtttccactggcaacgcctgggctacgtcagcgtgcaggccttcgccgagtccatggggcgcagcgagtcggcccagttcgaagcgttcgtccgcttcatcgacaccgacccggcgctacacaaggcgctgaaggctcgcaaatgggccgacttcgcccgcctctacaacggccccgactacaagcggaacctctacgacgtgaagcttgagcatgcctataaacagcacaccgaagcgcacaaggagacgacatgagaaccggcgcgcagtctggggagcactttccctacaaggagcttttggagcgcatgaccaagctgtctccgactggttgtgtggccgtggtactaccgcgcgacacaccgatggaggactgccaaaagatggccgacgcgctcaagcatgtgatggctgttcctccgctggtcatctgcggtgacgtgcagtccctggatgaagcggccatgaacgccgccggctggtaccgaaaatgacgactctccgccaggccctatacggagccgccctgctcagcgccctcggcctgctcctgtgggtgcagcagcagcgcatcgacctggcgcaggcccgcctggcccaggccgagttggcgaggaaagccagcgacgcccaactttcccgccaggccgacaccatcacggccctcgaggccgccctttcccgcgagcgtcaggcccaggccgatctggaccaacagcggcagcagctgcgccaggcgctggccatccgcgaacgcttgatcgaggacctgaaacgtgacgatgaaccctatcgccagtgggctgaccagcctctgcctgatgttgctcgccggctgcaacagcgccccgctatcaccggagcggccgcttaccatcagtggctgtcccgccgtgacgccctgcagcctggagtcagcggcaccgaaggacaacggcggcctacagactgaagtcgagcgtatcggcctggcctgggccgagtgcgccgcgaaggtcgacatgatcatcagcacccaaggggctacccatgaacaagcccgatagcctgaaggcgcatctgctcgccgccgtgccggaactcaggaacaacggcgaccgcctggtgatattcatcgacaacggccgggtccgcagcacctcggccgagagcctgtccttcgaatacgcctatgacctgcaggtgatcctcaccgacttcgccgggcaccccgacagcgtgtttctgccgctgctcggctggctgctggtgaaccagtcggatctgctggccaacctcaccaaggtgcaggacggcatcaccttcgaggccgacatgctcgaccgcagcaaggtcgacctcggtatcgtcctgccactgaccgagcgtgtcgtcgtcaagcgccgcgaggatggccgctacgatgtgagtcacccggaagagccccagctcaccgaggccatcgaggtcgatgggccgatgcagatgctcgccaacggcgagctgctggccgagtggacgccgccgacgcccaccgaggccgtcatgctcgagacgccgcagatcaggcgcccggccaatggctgacagcctcgaggctctggaagactgggcagggccgattctccgcgccctcgagccaggccctcgtgctgccctggcgcgttcgctcgcccgcgatctacggcgcagccagcagaagcgcgtaatggcacagcgcaaccccgacggaagcgcctacgagccacgcaagaaacgcgaactgcgcggcaagcagggccgtattcggcgcaagatcaagatgttccagaagctgcgcacggtgcgctatctgcgcgccaagggcgacgcccaggcaattacggtttccttcgctggtcggatcgcacgcatcgcgcgggttcaccagtacgggctgagggaccgtgctgagcctggcgctcctgaagtccaatatgcgcagcgctcccttctagggttcaccgccgcggatctagacagcatccgcagcggtgtcctaaagcatctccccccctgacattcaatatcaatcccactgccgatggcgctcggcaaatttcagtacgtgttcgttgtaaggcttcagcttgaagcgagtgcggtgaatgtactggcggccagtctcgcgactcacagccatggagctgatttcatattcccccggtccttgctccgtgaggttcaggaaggtgtcactcgaaacgacatccaacggcgcttggttatcgtcaacaaccacaagcagctcgcgctcatcagtcggagtgatgccatgggtgatcttgtaaacaaagagttcccaggacgcttccggcatttcgcgctggccggactcccagagttcccaggtgcgtttggatacatgtaccaactgcgcagcttccgctgtgctagctccgagaactgatcgcgctttacgcgccaactctccccttttcgcagaattgctgctcataaaaaccctcctgggcatcattgattaaccgctcaaaacaagcgggcatagaaaaaaatacgccataatcacaatcctgcgcaagagcggatttttgttcatataaaacctttgtacgcaaggctcgtacaagccccgctgcccgcatcctttcccataacagcacatgcttggcgcatggctgactttgcaaccctctcccgtctgatcgagaacctgatccgccttggcacaatcgccgcggtggaccatgccgcgcagcgcgtccgtgtattgaccggtgacctgctgaccggctggctgccttgggcatcgccgcgggccggcgccgaccgcgaatggaacgcccccaccctggacgagcaggtactgctcttcagcccatccgggcagaccgccaatggcgtggtcctgaccggcttgttcagtgacctgatcccgcccaacggcgaccgcgacgccctgcatcgcatcacctaccgcgacggcgcggtgattgagtacgacagcgcagcccaccacctgcgcgcagttcttcccgccggcggtaccaccgagctcatcagcgacggcggcatccgcatcgtcggcgacatcacccaccaaggcgactacatccagaccggcaaccagaccgttaccggcaaggtcaccgtgagcgtcgacgtgatcgccaagggcatcagcctggtcggtcatacccacggcggcgtcatgccgggcggcgctacgacggggaaaccgcaatgaacgcccataccggcggcgccatcgaccgcttggcacacatccgccaggcgatcgccgacatcctcaccactcgcatcggtacccgcgtcatgcgacgcgaatacggcagccagttgccggagctgatcgatgctccgttcaacgacaccacccgcctgcaggtctatgccgccaccgccatggccctcatgcgctgggaaccgcgcatccgcctgagccgtgtccagatcaccggccagaacctggccggccaggtgctcatggagattgacgccaccctggtggacagcaacgagccacacaacctgagcatccccctgcagatgggcgccagcgcatgacaacgaacttcgtcgccatcgacctcagccagttgccgccaccacacgcggtggagcaactggactacgagcagatactcgccgagcgcaaggcctacgccatcagcctctggccggaggatcagcaggcggaaatcgccgcccgcctcgccctggagtccgaaccgctgaccaagctgctcgaggaaaacgcataccgcgaaatgctctggcgccagcgggtcaacgaggcggctctcgccaacatgctggccagcgcccagggcgccgacctcgaccagctcgccgccaactacaacgtcaggcgcttggtcatccagcccggagatccgtcgaaggtgccgcccgtgccggaactgctggagtccgacgacagcctacgcgagcgcgcgcagatggcctgggaaggcctcagcaccgcgggaccccgtaacagctacatcttccacgcccacgccgccgacggtcgcgtcggcgatgcctcggccgtcagcccatcgcctgccgttgtcgtggtgacggtgcaggccgcccagggcaacggcagcgccccggcggacctgctggccatcgtcgacgcctacctcaacgacgccgaccgtcgccccgtcgctgatcgcctgacagtccagtccgcccaagtgctcgagtaccgcgtcgacgcgacgctctacctggccaccatcggcccggagtccgagccgatactcgatgccgcccgggcccgcttgacggcctacgtccatcagcgtcgacgcctgggcatggaagtgtccgaatcggcggtgcatgcggccctccacgtggaaggcgtgcgcaaggtcacgctcagcaactggtcggacatcgccgccacaccagcccaggcgccctactgcaccggaattacgctgacgctgggggatgagtgatgcccagcttgctcccacgcaacgccaccgaacttgagcgcctggccgccgaagccctggcgcagatcgaacgggtaccgatcccattgcgccaactgtggaaccccaccacctgcccggtcgcccttctgccatacctggcctgggcgttctccgtcgatcgctgggacagcacctggccggagcgtgtgaagcgccaggtcattcgggatgcctacctcgtccactcccacaagggaaccttgagcgccctgcgccgcgtggtcgagcccgtcggctcgctgaccgacatcctcgagtggtggcaacagacccccgccggcgtccccggcaccttcgaaatcaccgtcgacgtcagcgacaacggtctcgacgaggagaccgtgctcgagctcgagcggctgctcgacgacgtgcgcccagtcagccgacacctgacccgcctggacctgcgcatcacgccggacatcctggcccgccacggcctggcgacgatcgacggcgacaccctggaaatcagcccctggaagcagtgatatgacgactcccaagtacggcggcctgctcaccgacatcggcgcggcagcgctgatcgcggcgagcgaagccgggaagaagtggcagcccacccatatgctcatcggtgacgccggcggcgcgcccggcgagacggctgaccccatcccctcggccgctcagaccaagctgatccgccagcgctaccgcgctcaactgaaccgtctgttcgtctccgagcaaagtgcaaacgtgctggtcgccgagctggtactgccgatggccatcggcggcttctggatacgggagatcggcctcgaggacgccgacgggaagttcgtggcggtcgccaactgcccgcccagcttcaaggccagcgtcgagagcgggagcgcgcgcacccagaccatccgcgtgcagatcatcctatccggcatggagcacgtcgaactgatcatcgacgacggcatcgtctacgccacccaggactgggtgacggcgaaggttgccgcggacttcaagggacgcaaggtgctggccggcaacggcctggtcggcggtggcgatttgtctgcggatcgcaccatcgccttgccagcctccggcgtgggtgccggcacctaccgtgcggtcaccgtcaacgccaatggcatagtcaccgccggcagcaacccgaccacgctgggcggctacggcatcacggacgcactgcatgccagcgaggcggtcactaccccgacggcgaacaagctgctcaggctgaacgcggccggactactaccggcctcgattacgggcaacgcagccactgccagccggcttgcagcgcccatcacgctcagcgcgagcggcgatgcaacgtggtcagttcggttcgatggggccacaaacgtcaacggagtcctgacgctggccaactccggcgtcaccgccgggacctacgcgaaagtcacggtgaacgccaaaggactggttaccggagccagtgggcttgtagcgagtgatattccggcccttgatgccggaaaaatcacctccggcatcttacctgcagccagaggcggtaccggcaatggtattggtcaggctgcaacggcggtcaaactcgccgcccctcgtacgatctacctcggtggggacgccagcggctcgacaacgttcgacggtagcgcgaacgctggaatcacggtcacgctggcgaactcgggtgtaaatgccggctcctaccccaaagtcactgttaacgccaaggggctggttaccggtggcggtggactgacggcagcggacattcctgcgctggatgcttcgaagattgctaccggccgactcgatcttgagcgcttgccgttggtctctcagggactggccacggctgtgcataccagcgttgatcccaactcggtagtcattccgcttgtgctgaccaaccacgcgaatggcccagtggctggccgctactactacatccagacgatgttctacccgagcgtcgaaggcaacgcgacgcagatcgcaaccggctatgccggcgtggctgatatgtacgttcgttatgcctacggctcccccgcaacgaccgatccttccaagcgagagtggtcagcatgggtccgctgcgatctgggaggggcgttcgctcatgcgccggatggcgtcctgggtggcggagtcaacttggattcaatgattgcgtcgggctggtggcatcaaccgttcagcgcgaacgcacagaacggcgcgaactatccagtgggcgaggccggcatattgacggtgcatgctccaacctcctcgatgatctatcagacctatcgtggctatgccgctggcggtctgtactggcgctgcagatacaacggcacctggggaggatggttccgggcatgggactccggcaacttcaacccggccaactacgtggccaagtcggagtacaactggtcttcgctgccagggaagccggcaaccttcccgccggcagggcataaccatgacgctagccagattacctccggcatcctgccgctggctcgaggcggccttggggcgaacaatgccacgacggcgcgtagcaacatcggagccggcaccatcgccacagcatccttgggagcaagcggttggtggagggacaacgatacgggttacatccggcaatggggccgggtgactgtgcctggtgatggtaccgcggcgatcaccttccccatcgcgttcccgaatgtctgcttgggcgggttcgctggtcaaactgcgaatttccacccaggaaccgacgcgagcacctcgttctataacccgtcgacgacaggtgcaactttggaaaacgggtatcaattccaggcggttttgctttgggaggcattcggtcgatgagcgctagctatgttttctcgccgtccacgagggtcttctaccccgtgtccttgcgcgaggtctacgaggccgggatcggctggccggatgacggcgtccccgtcagcgatgaagtacacgcccgcattctgctagaacaggagtctggccgtgtgatctgcgcggacgccggtggacagccagcaacgaaagaaccaccgccgcccacagaggaggtgcaagccgcgattgagcgcaactggcgcgaccgccagctcgtcgacaccgacgccctggtcgcccgtcaccgcgacgagctcgaggttggtaccacgacgctcaacgcggagcagtaccaggcgctgcaggcctaccgccgccaactgcgcgactggccggagctcggcgcgtttccgctcgctgagcacaggccgaccgcaccggactggctcgacgccctcttcgcagatggcgtcttgtagcttcacgacgtacaagcttcccacctcgccccatcgccgcgcgcgcggcagcctgtgcagtgtcatccaaccactgcacaggcacaccccatggccgctgaccaataccatcacggtgtccgggtccaagagatcaatgacgggacccgccccattcgcaccatcgccaccgcgatcatcggcctggtagccaccgccgaagacgccgacgccaccgcctttccactcgatacaccggtactcatcaccaacgtgcaggccgccatcggaaaagcaggcaccagcggtacgctacccgcaagcctgcaggcaatcgccgaccaggccaacgccgccacggtggtggtacgggtgaagccgggcgaggatgaagccgcgaccaatagcggcgtcatcggcggcgtcagtgccgatggcaagtacaccggcatgaaggccttgcttgccgccaaggcccgcttgggcgtggtaccgcgcatcctcggcgtaccgggcctggatacccagccggtcgctaccgcactcatcgccatcgcccagcagttgcgcggcttcgcctacgtctccgccaatggctgcaagaccaaggaagaggccaccgcctatcgcgagaacttcgccgcgcgcgaagccatggtgatctggccggacttcctgacttggagcaccgtggtcaaccagaccgtgcctgcgccagctgttgcccaggccctgggcttgcgcgcccggattgatcaggaggtcggttggcacaagacactgtcgaacgtcgccgtcaacggcgtgaccggcatcagcgccgacgtgttctgggacctgcagagccccagcaccgacgccaactacctcaacgagaacgaggtcaccaccttggtgcaggaagggggattccgtttctggggttcgcgcacctgcagcgatgatccgctgttcgccttcgagaactacacccgcaccgcccaggtgctggccgacaccatcgccgaagcgcacatgtgggcggtcgacaagcccatgcacccgtcgctggtgcgcgacatcctcgagggcgtgaacgccaagttccgcgaactcaaggggcttggtttgatcatcgatgcccaggcctggtacgaccccagcatgaacgacaaggacacgctcaaggccggcaagctgcgcatcgcctacgactacaccccggtgccgccgctcgaggacctgaccttcttccagaagatcaccgacagctacctcgtcgacttcgccagccgggtcaatgcctgacgcccaacgctccccggacggggagccgacccacctgattcccggagagccctaccatggccatgccgcgcaagctcaagaacatgaacctcttcaacgacggcggtagctaccagggcctcgtgaagtcctgcaccctgcccccgctggcccgcaagatggaggccttccgcgggggcggcatgaacggcccggtcaaggccgacctcggccacgacgacgacggcatccagttcgagtggaccgtcgggggcctggagctgaccgtcctcaagcagtacggcgcagtcagcgccagcggcgtgatgctgcgtttcgccggcgcctaccagcaggacgataccggcgcggtcacgcccgtcgaaatcgtagttcgcggccggcacgagaccatcgaaatgggtgacgcacagcccggcgaagacaccgagcacaagatcaccaccacctgcagctactacaagctcgtcgtcaacggcgaggaagtcatcgagatcgacctgctgaacttcgtcgagaaggtcaacggcaaggacctgctcgaggcacagcgcaaggccatcggcctgtaaccccttcccgccggcccgaccggcggttcctctcccccttggataccgacgcccatgaaaaccgaacagactcccgctgacctgcagaacgctcccgacaacgtcgtaaccctcgaccagccgatcaagcgcggcgcccagtccatcgaatcgctcaccctgcgcaagccctcctctggcgaactccgcggcctgcacctgctcgacctgctgcagttcgacgtggctgcgaccatgaaaatcctgccgcgcatcagccagccgaccatcaccgagcccgaggccgccggcatggacccggctgacctgctcgcctgcggccaggtgatcgccggttttttgctgcagaagcgggcgaaggcggcagcctccctgatcgcgtagaaaacgccatggccgacctggccgtgacgttccactgggcgccggaccatatggaccggctctcgctcaccgaactgatggaatggcgcgaacgcgcccgggtacggagttccgctgatggcgaatgacctgcagctgcgcgtgctgctcagcgcgatcgacagagccaccgcgcccctgcgtcgcatcatgcaaggcagcgacgcgacggcccgggcgctcaaggcaactcgcgagcgcctgaagcagctcaacgctcagcagagcgacgtgcgcgccttccgcacccagcgcggcgccctggagcaggtcagcaccacgctggccacgcaacaggcacgggtgaaagcgctggcccagcagatggccgccgccggcaaccccacccgcgcgctcacccgcgactataaccgggccatccgtgaagccggtttcctcaagcagcagcaccttcagcagagccaagccctgcagcaactgcgcacgcgcctcagcaacgccggcatcagcacccgcaacctcggccagcatgagcgcgacctgcgggcgcagatccaggcggccaatggcgccatcaacagccaggcgcagcgcttacgcaacctcagccagcagcaggagcgcctgacccacgcccgcaacacctacagccgcggcatccagagcgccgccgcgctggcaggcaccggcatggcggcgcgcgcgacgggcatgtacaccggcgacaagctgcggcagatgctcggcgtgggctacgagttcgacgcaacgatgtcggcgacccaggcggtaacccgcatcgagcgcaaggacgatccgcagatgcaggcgctgcggcaacaggcccgcaccctgccgctgtccagcaagttcacagacaaggaagtcgcccagggccagtacttcctgggccgcaccggctacaacgcgaagcagatcctcggcgcaatgcccggcatgctcaacctggccgccgcgggcgacatggacctcggcgacactgctgacatcgcctcgaacatccagacggcgatgggtattccagccgagaagatggaccaggtggccgacgtactgactgcggcattcacccggaacaacgtcgacatccgcatgctcggcgactcgctgaagtactccgccggcgtcggccgcgagtacggccagagcctggagacggtcaccaccgccacggctctgctcggcaacgccggcgtccagggcagcatggccggcacctcgatgcgctctgttctgacccgcctgggcacgtccaaggcggtagccaagctgggcgtccagaccaaggatgccaacggcaacatgcgcgacatgctggacatcctgaaggacatcaacaagaagaccgccggcatgggcaacgtacagagaggcgcgatcttcaaggacatcgccgggcagtacgcggttaccagcttcggcaccctgatgcgcgccgtcgagggcggccagttccagaccatgcgcgaaagcctgaacaactccgagggcgaggccgcccgggtcgcgtccacccagttggacaacctcaagggcgacatgacaatgctgcatgcggccctggaaaacatttcggtcgagctgttcgacaagaacagcccctggctgcgcgaactcgccgccgacctcagtcacctgctgcacaacgtcggcgagttcctgaaggccaacccgcaagtcagcaagggcatcgtcatcaccgtcgccgcgttctcagcgctgatggccaccgtcggcagcctggccatcaccctcgccggcatcctcggcccgatgatcgcggtccgtttcatgctcagcaccatcggcattcgcctgcccggtctgatcggcctgctgaaattgctgttcgcaccgatccgcatgctggccggcctgttgatcggcccgctggtgaccgccctgcgcgtcgtgagcatcgcgctgtggggtctggccgccaacccggtggtcctggcaattgctgccgtcgtggcggtgctggccggcgccgcgtacctgatctatcgcaactgggacgccgtcaaggcgtacctgctggggctgtgggaagagatcaaggcaggtttcgacggcggcatcgggggcattctttcaaccctgatgaatttcagccccctcggtctgatctaccgtgcgttctccggcgtcctgggctacctgggcatcgatctaccggcacgcttcaccgatttcggcaacttgatcgtccagggcctggtgaacggcctgctcgccggcatcgggcagatcaagcgcgcggtccagcgcgtcggcgacgccgcgattgactggttcaaggacaagctcggcatccattcaccgtcgcgggtgttcgccgatctgggcgggttcaccatggctggactggcccagggcctcggcgccggccaggccggcccgctgagcgtgattgcacgtatcggccagggcctggtcaacgcagggcgccaggctgtcgccggcctggacagtggcacccgctctacgatcaccccgccggcagtggtggccgaactggtcgcggcccagcgccaacgctcgccgatgttcgaccagccgctgctggccatgctgggcgacctgggcaagagcgccggcgccatcggtgccctggtgctcggcgccagcgccccagcgcaggccatcaccatcgacaaccgtcccccggtcagctcggcgcaagcggcagtcagcatcggcggtgacacctactacatcaccatccaggccggcccgggcagcgacgccgcagacctgaaacgcacgctcagccaactgctggacgagcgcgaacgcaacaaggcggcgcgcctgcgcgcccgcctgcaggaccgggagtaaccaccatgatgctgtccctcgggatgttcgtcttcagcctgcacacgctggcctaccaagagttccagcggcagaccgagtggcgacacgccagcagcagccgcatcggtgcccagccggcgcgccagttcgtcggtcgcggcgacgacacgatcaccctgcccggcgtgctgctgccggagctggccggcagcgcgttgagcctggacgtgctgcggcagatggctgacaccgggtcggcctggcccatggtcgagggcaccggacgcatctacggcctatgggtgatcgagcgcgtcaccgagacgcggaccctcttcttcgccgacggcaccccgcggcggatcgagttctcccttgagctcaaacgcatcgacgacggccgcaccgatctgctcggttcggtcctcggtaccgccggcaacctgctgagacgcatcctgtgatcgatgccgccctcgcccgcgtatcgggctacctgaccagcgccgtcgaccagctgcagcgcgacgccggctacccggtgccggtgttccggctcacggtcgacggcaacgacatcgcccagctcatcagcccacgactgatcgccctggacctgaccgacaatcgcggcatcgaggccgatcagttgagcgtgacactcagcgatcatgacgggctgctcgcgatccccccgcgcggcgccgtgctgcacctctggctgggctggagtgacagcggactggtcgacaagggcacctacaccgtcgacgaaaccgagcacagcggcgcgccggacgtgctcagcatccgcgcccgctcggcagacctgcgcaagggactgaaggtcaagcgcgagcgcagctggagcagcccaaagacgttgggcgacgtgctcaccgacattgccctcggcaataacctgaagccggtgctcgcgccggcgctggcgggcctgccgatcctgcagctagaccaggccaacgagtccgacgccaacctgctgacacgcctgggcgaggacttcgatgcggtggccaccgtgaaagccggctgcctgctctgcctgccggccggcggcggcaagtctgccagcggcctggggctgccgcacatcaccctcacccgccaggatggcgaccagcaccgctacctgcaggccgaccgcgacagctacgacggcgtgcgcgcgtacttctacgacgtgaacagcgcgaagaagcaagaggccatcgccggtgccaagggcgacaacctcaaggacctacgccacacctacagcgacagccagagcgccctgcgcgccgcccgcgccgcccgcgccgaatggaaccgcctgcagcgtggcagcgccacgctcagctacgtgttcgccaagggccggccggacctgatcccggaactgacatacaccttgcagggcgtgaagacggagatagacgcgatcatctggtacggcggcaatgtgcagcacagcctcagcgccgacggcggctacatcaccagcctggagctggaaagcaagctgcccgaggacctggtcagcgacctggccgacgacaccggcggcgactacaccggcatcatcgcctactaccgcgacgagaagagcgggacggagaagaccatcaccgcgggagaccagagcaagccgcgccgcctgcgctacctgtacagcaccaaggccagcgcgaagcgggctgtcgatcgggagttgaaccggctgcaagtgagaggcaggaggtgatcgctcttccagcgcaccttttcctccacaaattgaagaaacctagctcagtcattgttcgttgaaactggatagaccatacagaaaacttgaacacatctcacagcacctttgagctcacgccagccccaccggtgagagtggccgtaacaaaacggataggtacccgcatcaaagccaaaccactagtttgcgtgccgccatcaatataagggcacacaatggaaaagatagaaacaagaataggtgaagctctagaagaaaccaccagaataataaaaaaccacttaaaaggaccattcccagtattccacgaaatatcaataagacatcccatcccactgagtccagagagaatatacacatccaaaacaggaagcgaccaaaaacaaggagcaacattcagactaacgctaacaccacaaaatctatacaaaacaacaataacaacaaaatacaaagacaccaaagtagaccatacccatgcaaaaatctacacatatgctttatttggaattctcataagtaataccaagaaaaggaccccaaacttattcataaccccagacaccaagctaaccaaaagagagctcgagatattacgtagatcagcagatggacaaacggcgctatcgatatctgagaaactaagtttatccccacacacagttaactctcatattaacagcgccactagaaagcttagatgcaggaacaaacctcaagccattgctttagctgcaattctcgaactcctctgaccctatcaaaactgttaggagccaagaaattcattattttttgccatagcgatttcaggagccaaacctaatcttccactggcagagcagcccgctctgctgcctactctaaggagatgactatgactactgcagaaagcttcatcaaaaacttcattgatgacaattttgaaaaccctgaagtacaacaactctacaaggaagctaagctaggagaggactctttcaaagacaaacttgcagaatcttacctgcagctttacagccacaagcagtcgcaggaggtattctacagcagcgagaagcaaagttatatcactggtggaggtggatccagtctatttccaatcaccaaggatattaacttcggaatagcatccttccacatcgttgtgaaccaaacgagcagcgacggatactctgtcgatgtcacctcaaagattctgggttttagtgtcggcacatcccgaatgtcattcgagaatggaactcttcatcgcgcagaagagattggaggcagctctctcggagcaagttacgatgtgaacttgaaagttattggtggatttggactccagcttgaagcgcacgtatgggttaagattcccattgcaggcagaaagtccattgatttcggcccaacctgggttatttagtcagcagtgaagaagaccccatcaggcaaatggtttggtggggtcatcaagaattaagtccctgcagcacaggccaagcgcttccgctcgtagtcctgctggtgttttttcagctcaggaagaggaccatccatatcggcctgcaccactatgtcggacaacacccatcccagtgcctcataggccttgaaacaggtttcactggcggtgctgcggataccagggcggtaccggtccagatcgccaaaaacctcagtcacctggtcaacactcgaggcctgcaacgcgtccagcatcctctggtgcaggttgtccatcagttcgacctgggcggccgagtcagccatcgcaacacacgagaccatcagtccgaccgcagcggtcattcccttgagccagttcatacgtccctctcttcacagtggggccttcggctacgaccgaaggcccattcaatcaatgccccctgagagcgcacgccaaccgcagcaggtccagttgatcctgctcgctcatctggctaaggcagatcagcagggcggtgagcacgatggggtcgatgggcctatacattggtctactcctttgacaggccacccggcgacacgatgtcaccgtgatagcagcccgggagtaccccattcttcacataggcccgcgtgccagaagcagaaatccacggtaggccgcccgggattttttcccatgctggcgaggtgtcctatttgcttgtacgacgcgactcagttgactctgagatacctcgccccacccgtaggtatgctattcggtcttcttcctccatggacttgatgtacctcagcacatcaagttcctcctgactgagtgactcaagctccgcaggctggcgacgcccagttataacgtaaagaacatcgactccaagctcagcagccacagctagaactgaagccccaatatccccgccgccaccttcgtaaccggcgatagtccgcttggccactccgacgcgctgggcaaactcatcttggttcagcccaatacgcttgcgctcagcctgtagccgagcgccgatctcttctcgtgaaagatgcaaaaaaattcatctccgctattgaccaatgcagaaacgtgcatcattcttcggttgtcatcacacgaaattgcacgaatctgcactatgccgaacgcctacccgacggagcaagcccgcgaggcagcccgcaaacacatatctcgactgggcctttcagtccgggaatgggccgaaagaaatggcctaggagaaagcaccgtctacgccgttctcaacgggcaaaagaagtgcctgcgtggcgaagcccaccgcgcagccgtgttgctcgggatcaaggacggagtaatcgcacagtaatggccaccagctttgagagacaccagaagatgaaacgcccgctcctagaaacgcggcgccaggtggtcagcgcgatcatcggcgcctaccccggcggacgcgaatgcgccgccgcccgcctgggcctcgacctgaagaagttcgacaaccacgcctacgagaacgccggcagcaaaccgctcagcgacgaccagttgctcctgctcgagcaggaaaccggcaccagccacttccccgagtatgtcgcccacctgtacggcggcatgtttgtgcagatgcccgacccggtccagttggacaacctcgacctgtacgcccgtggcgtcaccaccgccatcaggcgcggcgaggtcgaccgcatcatcgccgaggcgctgcgcgatggagagatcgacgaggccgaactcgccgaaatcatcgtcgcccaccgccaacacctggccgcacggcatgccgaagtcggcgcagtgatcaccctgcaccggagggtcaaggcgtgagcgtctacaagctcgtctgcccctgctgccacagccggatgcggatccgctcctccgagggccaaaccccgtgcttccgctcgatgtacgcgcaatgcacaaacgcgctctgcggcgccaccttcaccggctccctgagctgggactaccagctcagcccctcgggcctcgagcggccactgctggtactccccatggcgccttcgaaaacccgtcaactggcacgccgcgacctcgcggccgcaaccaaccaactggacctgctggatcatgtggagtgcatgcaatgaacggcaccaacgactaccgcagcaccatgcagcaagccgccgcagcgtacctgctggccaacgccaaccagtatctgtcctccggctccgaccggttgttcgatgcctgtgtcaaccatctggccaaaggcctcgaggttccccagttcatggccgaacaactcgcccagcgcgcgtgggatgaagtcttcgcggggccagaccctatctggctgggtatcgactggggccagggagacgacgaggtggtctacctgatcgacacccgcagtcactgtcgcttcccgatcccggcccgctatctgcccgcgcacctgctcaaacagcgcccccagcacacccagtaatccctgaaacacgccctacccactgccgtgggtttggggaagttacgcccagaattcgaggtatcccgccatgagcggccacatttcaatcaccgtcgaagtcgaccagaaccaggctgagaagtacctgctctggctggtcagccagtacgaagccgccatggccgagtgctggtacgacgatcgctaccgctatacgccgcaggggctgcgcggcaagcgcatcctcgaggaccgcccacacattgccggcatctgccggacgatccgcgaactgcgcaagcagattcgggggcgcgcatgaaggaaatggaccgcgagctcaaggccgacgtgctgctccgcctgcaggaccagtacggcctgatgccaatcaagggcacaaagtacatgcgcaagggcgagtgcccaacgtgcggcaaaaaggagctctacaccctggtcgacagcccctggttcatccgctgcgggcgcggcaagtgcggcgacacctggcacatcaaggaaatctacccggagctcttcgacgactggagcaagcgagcgccggccaccgacaaggaacccgccgcctcggcccgggcgtacctggcacatgcccgcggcttcgacttgacgctgatcgatggctggtacagccaggaaaactactgggcccgcgaccttgagatcggtagcgcgacagtacgcttcccgctgaagaaaggcggctactgggaacgcctgatcgatcgcccgagccgcttcggcaagaagaaggcgcgcttcaagccgggcgacagcccgcgaggcgtctggtggtgcccacccagcgtcgacctgcaggaggtgaaggagctgtggatcgtcgaaggtatcttcgacgccatcgcgctgctgcaccacggcattgacgccgtgtcggccatgagttccaacgccttccccgagcagtctttgcgcgaactcgcgacagcccgtggcggcaagctgccgaaactgatctgggcgctggacaacgaacccggcgcccacaggtacacccggcggtgggtgaccgaggcgcgtaccctgggctacgtctgcgaagcggcccaactaccgcagcgcaacaaccgcaaattcgactggaacgacctgcaccagcgctggatgttcatcgatgacgcggccgagcgcgccgcgcagatcgagaaggacctcaagaccgcacgtcatgagggcgcgctgctgatcgccgagagtcctgccgagaaagcgctgctgatgtacgactggaacagccgcggcgaattccactttcggttcggcaacagattgttctggttcaagctggacctcgagaagttcgaccgggccatgcgcgcgttcgaaaacagcgacgaccacgaagataagttgctgaacgacagacagaagcgcgacaaggcgctgcagcagtccggcaatgtggttgaaatcgcaaactgcttcccccaggccctgtacttccagcgcaacgaggtcacagacgagagctggtactacttccgcatcgatcgccccgacgacgagagcgtgaagaacaccttcaccagcgcccaagtcgcggcggccagcgagttcaagaagcgcctgctcggcgtggcagcgggggcgatcttcaccggcagcggcgcgcagctcgaccagatcatgaagctgcaactcaccggcctgaagacggtggccaccatcgattacctgggctacagccgggagcatgcctgctacgtcctgggcgacgtggcggtgcgcggcggcgtgatcgagaaggccaacgccgaagacttcttcgaattccaaaagctgcgcctgaagaccctgcagcgttcgatcaagctgcagatcgccaccgacgccaaggactaccgccccgagtggctggactggctgtggacctgcttcggcgccaagggcctggtggcgctggcattctggttcggctcgctgttcgcggagcagatccgcgccgagttccagtcctttccgttcctcgaggccaccggcgaggccggtgccggcaagtccacactgatcaccttcctgtggaagctgctcggccgggcggacgaggaaggccaggacccgtcgaagatgaccaaggcgggcctgcgccgctggctgacccagctgtcgaacatgcccatggtcatgctcgaggccgaccgcagcgacaacagccgcgccggcggcgccgccaagtccttcgactgggacgagttcaagccgctgttcaacggtcgcgcgttgggcgtgaccggccagaagaccgccggcaacgagacctacgagccccccttccgcggcaccctggtgatgagccagaacgccacggtgcaggcctccgaagcgatcatgacccgtatcgtgaagctgcacttcattcgcccggaaatcacccgcgagagccaggccgcggccgacaacctcaaccacctgggcgtgctcgaggtcagccacttcctgctgatggccatccgcgccgaggcccgcgtgctggagtgcttccgcgagcggctgaaggtccacagcgcgacgctgcgcgctctgaaacagattcgtatcgagcggctgatactcaaccacgcgcagatgatggccctggtcgacgcgctgcgcctggtggtgccgctgtccgagcaccagctcgcctgcgctcagcagaccctgatgacgatggccctggagcgccaggacgccgtcaacgccgacgcgcccgaggtggccgagttctgggaggtctacgactacctcgaaaacctcagcgaagagccggtgctcaaccacagcaagaaccccggaaccatcgccatcaaccttaatgagttcgtgaagctggccgccgaccaccgccagaaggtggccgacgcggcaaccctgcgcgacctgctgaaagagtcccgccggcacaaattcatcgaatacaaggccgtcgacagcgcagtgcgcgcggcacacgcccgccagaaccctttcaccaaccgacccagcaccgtcaagtgctggattttccaagcctgaccggcgcggcaacgccggaaccacaatccgataggagagacaccatgcaacccctcccccacgactatctgcaactgatccacgacttccagaccaggcagcaggagaacgaggtagccggcctcaccgcgctgaaacgcctgctgccgatcgcccagcgcgacagcagccagagcggcgtgatcggtcggttcctgctcggcctgtacaacggccaagcccaccgcttcgacctcaccgagctgcgccgcctcgacccagcgctgttcgatgcgtgcctgtccgtgctgcgcatggactacgccccgaaacaggaagtgcatgagtacttcgaaaacggcgatgcgatctggcaggacctgagcaagcgctgggccgcagcgacgcttgcagcataaggaggctgactgtggatgtgatcgaccaagccaacgaacgggccgagaacatggtccaggccgccctggcccagcggacaaacacccgcctggcgcccagcgccctctggtgcgaggactgcggagagcagatacccgaggcccgccgccaggctgctccgggctgcgagtgctgcatcagttgtcaggaactgcgcgagcaccccgcgcggcgctgaagaagaggcgccagggagcggcaactccctggcgccaaccaccccaaaggagagacaccatgcaagcgaatcagcctcaaggcggcggcgccaaggctagcacaaccacgtcggcggctcgcactcgcccagcgatggccagcaagcggctggaccttccgagcatctgtgatatctgcggcaacgcacgttccaccggcaaacaccaacgctgcagccgaattcgccaacaggccaaggctgtcgagtgggccagctacatggccaacctggcggccaggaaaacgcagggagggcggcggcatgcttaagcgtaccctctaccacttccacttctgctgcggcctgggcggcggcgccaagggcttcaaccgctcgcgcccgcgcgtcggcaatgtcgaagcgcactgggaatgtctcggtggcatcgacgtcgatgcgggcgtcttgcgcgatttcgccaaactggctggcgtaccaggcacccagttggacctgttcacccgcgaccaatacatccgcttccatggaaaggagccgcccgccgattggcgggaggcaaccccggaggacatccgtcgcgccgccggcggcaaaagaccggattgcgtgttcatttccagcccctgcaagggcgcgagcggcctgctgtccgaggaaaaggcgaaaactccccgctaccaggccctcaacgaactgaccctgcgctgcatctggctgatgggcgaggcctgggcggatgacccggtgccgctgatcgccttcgagaatgtcccacgcctggcaacccgtggccggcacctgctcgaccagatcggccagttgcttggccactacggcttcgccaacgccgaaaccacccacgactgcggcgagttgggagggctggcgcagagccgcaagcgcttcctgctggtggcacggaacatcgaaaaggtcccagccttcctgtacgagccggagaagaagagcctgcgcgccgtcggcgacatcctcggccgtatgccgctgcccggcgacatcgaggccgcgggcccgatgcaccgcgtgccatcgttgcagtggcggacctgggtgcggctcgccctggtacgcgccggcagcgactggcgcagcctgaacgagctggcgatcgaggatggccacctgcgcgacctagtaatcgtgccggagtaccgctccggctacatgggggtacatgggtgggacgacactgccggcaccatcgccggccgctccggccctaccaacggtgcgttctcggtcgccgacccgcgctaccgtcaggcttcgaactggaaccacggccagcagttcggggtgatccgctgggccgagtcagcgccgactatcccggggcaaacgacgccaggccaaggcaccttcagcgtcgccgacccgcgccccaactggaaccgccacagcggcaactatcgggtgatccgctacgaccaacctgcaggcaccatcatcgccggcggcaagggcgtccagggcggccagcagtcggtggcagacccgcgcatcctgcaccgcggcaagggcgacaactacctgaccggcggccactacggggtgatcggcttcaaccagcattccggcgccatcgcggccagctcccgctacgacagcggccgattcagcgtcgctgacccacgcatcccagcagcggacgaacgcctgacctgcattatccgcagcctcgacggcacctggcaccgccccttcaccacgctggaaaaggcagccctacagagcctggtcgagcccgaggaatacctggtgctcgacggtatgagcgacaaggactggagcgagcgcatcggcaacgccgtgccgccacacgccgctgaggccatcgccgatgtcatgggcaccaccctgctgctggccgagcagggcgagaccttcaggctcagcaaaaccccaatctgggtgcgcaacgtggcggtggcgctgagcgtttcacaacccgctgaaagtcgctgaggtgaacggcatgcacgaattattgaagatgctggacaacccgcgcagcttgctgaacttctcgctggcgattctggctgtcctggcggtgttcttcatgttgaagagcggcgcgcaagctgattcgagccccgtcatcgatacccagaaaacaggggccatcattctagtcagtcccgagggagacagggcggtatgatcaagcagcccccgggcacaatcctgaccttcgaggatctgcagcagctaaccggatacaccaagcgctctggtgtagagcgggcactgcgtaaacagggaatccgttggttctggggccgtcacggcccctggaccaccattgaaatggtcaatcaggcaggcgggcaagcagcggacgacgggcagtacgacagcagaatcctatgaggcgatcccgcaagcggaagcataatccgcacatacctcagcacatcgaccaggccgccattccggcggccgttttcttcgatcatcgtggtaacggcgtgtggtacacgctgcattatgatgaaggaggccgccagcggcgaacgaacctcgccccctcctacgtgagcctctccgagctccaccgcatcatggaggaacgggacgggatcgatcgagacagcctggcgcacctgtgcagcgagttccataagagcactcagttcaagcggttgaaacccaagacccagagcgactacgagtattgccgggaaattctactggccatcccaacgcggctaaagaagccgctcggcgagttggcagttcgaaagttctcccctgctctagtacagcgcttggtcgaccgtattaccgaagaaggcaccccttcgaaagccgcccatgtgctgcgctacttgcgacgagtgatgcagtggggccgcaaccgcggctaccttgaaatcaacgtcgcccaaggcatcgaagcgcctgtagaacgaaagcagcgtcgccttcctgccccgacggtgatgtaccgtctgatcaatcgggcacgcgaattgggcaagctcaagcgagggcaaccaggcgcatgtcccgcatacctaagcagcgtcatggaactggcctacttatgtcgcctgcgcggtatcgagacagtcaccctcagcgacgccaacgaactccccgagggcgtacttacgaaccgcagaaagggcagtcgcaacaacgtcgtgcgctggacacctcgcctgcgggctgcgtggaaccatgcgaaggcctaccgtgcccaggtatggacctcgaagtccataccaaccccgaccgagccggaacggcggccgatcatcgtggcatcgcacggcggctcactgcagaagtcgagtctagactcagcctggcagcggttcatcaccgccgccctcgagggtggcatcatcactcccgaccagcgcttcgggctgcacgacctcaagcggcgcggcattaccgacacccccggcaccagagccgataagcaagaggccagtggccaccgagacgagtcgatgcttgatgtctacgatctgagcgtgcctctcgtatctccttccgccgactgactcgcgtgtgtaaccggcaggtcccgctacaagacctagtgaagccgccacgaaacacttaaaaattcggagtcctttctggtggtagaccgtacaaacctgccacattgtgggcgcatttcagcgcgatcccggaacgtctaccgtttatcagcgtcatagccactgatgatgacgtttattgacatagccgagttgacacaggaacaatccacccccattttgaaaaggcgttaccactgtggaaaaaacacaggtggataaccgccaaaaattgggcacggagacagccatgggccacgcactgaagaaaaccgaccgcatctatatcccgccgcgcgacaagtcgcaggtagcggtagcgcgtccggctgaaggcgaatacaaggcccagctcgaaaaggctttctgcgccgcattccagcggtacgagaaagcgcttgaggaactggccaaggtataagccgtgaccggtagggacctctcgcaattcggcgagatttgcgaaggcattcgctacctcactgtcgacgcgctggtttggataaaccagcaactcatcctcagccaaaccccggccgaaatggtcggggttctgaagccgaatgagcttgagtcttcgcaacaacgccccgctcagtaccgttgctacgcccagaatcaggacatgtactgtctagcttctgtcctcatggaaagcctggtcagaaatcaccccttcgccaacgccaacaaaaggactgccgccgccgccggcttcatattcctgttgatgaatggttacgaactcaccgccccagggcatgagctcgtcacgattctggtcggcctttccaccggagagtacgacagggaagatatcgagaactggcttgcgcactggggccgcgactacgatagccgtaacctcaatgcacctgatgcctggcttgaaatgtacgcagccacgctgaacgtcgtcgccggcgagtagtccagcgctcagcgtgtttaccacgctgtactgatagctttcgacgcgcatacctgaccgtaatttcctcgaccttagtctgaaagggccttttccaggcgatatacgtacgcccgcttccagttgcgacatcgtaatccgcccgccaaccttcttgtgccttctgctcagcagttcgcatagcgccccccctgtcgaatcccctcctaccgactggcacccgtgcgtaacaagtaggctagaagccgcatgcttccaggcttttctgcacgcccatacgtaacaagaatcaacgtaaccaactgatttcaaagcattgcctagctttcttgtaatcagtaggtcccgggttcgactcctggtgccggcaccattcaaggttccatagaaagctttcaaaatctctggaacccccgaaaaacccgccttctggcgggttttttcgttttggcgttccgtcggattccgagggtagccagcgctaataagggtacttttaaggatacctaccaattcgacattggaaagtacccttatggctcgcacaacggctccccttaccgacaacgcctgccgcactgcaaagtctcgcgaacgtgagtacaagctttttgacggcgatggcctttacctgctcgtgaagcccaatggtcgcaaaggctggcggctcaggtacgtgaagcccgatggtcgcgagggcctgacctcactcggcaattacccggtggtcgggctggctgacgctcgccacaagcgcttcgagctcaaacagcagctcgccaacggcattgaccccatccaatccaagcagcaggccaaggtgcaagccgtgatcaatggccgtaccttcgaaagcgtcgcgctcgattggtatgccgggatggtgcccaagtgggcgccgggccacgccaagactgtgctcagccggttgaagactcacgtattccctttgctcggtgccagggcaatcgtcgagctcgatacccacgacctcatgcagcctctagaagccgtgacgaaacgcggcaccatcgacgtggcgcttaggatcaagaactacctgcaaagcatcatgcgcgaagccaaacggctgcggctgatcaccgcgaacccggctcacgacctcgacggctcgatcagagcaccacgggttacacatcgacccgcactacccttatcgcggctgccagagctgcaagcacgcatcgacgactacaaaggtcgtccactcacacgccttaccgtgatgctgtcgctgcacgtgttcgtacgctccagtgagctgcgcttcgcccgctggaacgagttcgacctcaatcgcggcatctgggagatccccgacactcgcccggcgctcgacggcgtaccgttttccacaaggggtacgaaaatggccggagacattcacgttgtacccttatcgccgcaggcagtgaccttgcttgagcaaatccacgcgatcaccggcaagttcgaactggtgttcgcgggagatgccaaaccgtggaaacccatgtccgaaaacacggtgaatgccgcgctcaggacgatgggctacgacaccaaggtggatatttgcggccacgggttccgagccatggcgtgcagtgcgctggtcgagtccgggctgtggtcagagacggccatcgaacggcagatgagccacaaggaacgcaacaacgtgcgggccgcttatacccacaaggccgagttcctcgaagagcgccggatgatcatgacctggtggagccggtttctggaggcgaaccgcgaggaccatgtcacgccgcatgagtttgccaagcagacgggcgagaacgtcacgcggcttcgcagtgccaagaggaccgagtaacccgccgcaccacctccccaaactcgctgtgaagttacccacagccccgcatgtagctcctccgcgcgggtccatttaaacgaggcggcaaagccgccccgtttcaatggacctaaccttattaaaagcggctggcacagttatcgtctgtggaaaaccactgatgtccactgggggatagctttatccacaggcgctaaatccctgatatcgcgctgcttgacgaatattgtccacaagcgtagaccgggagtcgcaagagctgtcgatgacagcaccccaggtgacccgagccttaaaggtcacgccgctcccgcggtggttcacccgcaagtacgattcgcgtccggcagctcgtacggtcactacccatgtgatggatgccaactcaatatcgttgcccctgctgcaaccaccctacccatctgctcagcagcaacctatccgcttggccatttcgcgtgcgccaacctgcgcccgtctctttctcctggaaagagacgggcgcgtctaacactgctgcagccctcatcgcatttggctttgcggcaacttcactcgtgacaatcggcgtgacaaacgccgatgtcaccagcaacagcgctgtagatgatggtgccgcagaccaaggaatggactgcacctgactgacagtcaggcatgccccggtcatcgcaccgctgcgttctcccggctcaggatctcgcggcactggtctcgtcagccaatgcagcctccgcccgcccaccggtaacggtgctcaggaggccagatcatgagatgcccttgctcccggacgtaaggagccgccagtcccgcgttagaggatatccccacaggtcgcaggggccttgatccctgataacactcaacattcttggcgggatgacgtggggcgaggatcggagaacggtagatgaggtgactgacatggcattggtaggtaggcgggatggccgcaatttcggctatggcaggcaactgagctatgcaggcccgcaggcgttgaaagacatgttcggcggcggccattacggcacggtgaaggcacactgtgatcggtggcaggcattcgtgaagtggtgccgctcagaacacgggccgggtatcaatgatgcgcggcagattgatcggaaggtgttggtggactatgcggcgtatctacgcgacatggttaggcgcggtgagcttgctgtcagcaccgcacaaaaccgcctatccagcgttaacaggaccatggcggcgcttcgcggtgatcagtacgtgaggttgccaagtccgagcaaggcgttgggtatgcagcgcagcggggttcgtcactcggtgccgcagggacaagatcgcgaacaggttgatgagatggtcaatgcgctttgccgaaataatcagcaacgggccgccgcgattgttctgttggcgcgagccaccggtatgcgcttgcgtgaggccatcttggctgacctgccacggttaagccgtgaggctaacgatctaggcaagataaacatccaggatggcaccaaaggtggccgcgccggcgcttcggcgccacgttggatagcagtggacgatcatattcgcgatgctcttggattcgcatcgcaagcgtcaccagctggtagccgcaacctgattgcgccaaacgagagctacctgaatcttctgcaggaaagcatccgctctgcgcgggatatcctgcatgcacacaacctcaagggcttccatgagctacgagcggcgtacgcatgtgagcgctacgagcagatcaccctacatcccgcgccaatcaacagcggccaatgttgccaggtagataggaaccttgatcgtgaggcccggtggcaaatcagctgcgagctggggcacgggcggatcgacgtggtcgccgcctacattggtggccaggcatgactaagccattcgacatggagctgttcctagctggagtgttaaccggctcacacgcaacccggcgacgccatatacgccaagcgaaaatcatccaggttgaaattgcgaagcgctggcaacgagaaacgccttgggcttggcagaaaaagcatgtggtctggtttctcacgcacagcctgagccaccgcagtgaggcgacaaggtactactacctgttaaccgcccggctgctcgctcaacgtctaggtacgtcttggcttttctatttttaattgagacctgatgctattggttagcgccatcagcaattggcaagaagcggagcgagagctcgagagttcttggaccgctataatgcgtcaggaacctagtacggctgatgggtataaaggatctgccccaacgcccgtatgaacagctcgattctcatgctgataaatcacacatcaaccgacgatgcattgtctgagaagtcgtattaaaaataggccaccacgcatgcacggttcaattcaaccaagtaaaaaggcctcaaaatttagaggcctatgtaatttagctgttatcaatggataatgagcttacggggatgtgaaaatcttgagatccacatcaagctcatctgcagtgctcagccagccctcaattagttgatacgcctgaatacttgtgggtgaacatgctagcgggctctgcatacttctcgtgaaatgactagctgagaaagaattaccagcaacaatccaaatctcctttttacatttcatcgatactacccgctcacatataacatcccagaccctctcagagagtgagtcatcaagtggcgcaggatgattaatagagccttccaccaacctataacgagtatctagcggaaactcagcaccagcagcgggccaggattgcttccatgtagagaaatttccaggcttcactcttctaggccctgaaactaacatgtgaatattttttattgcctggctaccaacttctgcaatagcaccggctggagattgaggatttaatgagtcaccacatttaacatgaacgaagcacaatttttccggcgaagacaaaataaaatcagcaggctcaatacccatatcacaacaaagaactatatcacagccaggtatatatgttgcgaacggaccaagatttccgattggagttgtttggtccccataccccttcagcaagtcgattaagtaaaatatcgaatcagtatcaaaatcagttctagtagtccgatgatacttatgattgagcgtgtgccccttctctctgagatctggagctataagtgcgtcaagcggaaaaatggcattgcctgcaaagctttcttcagcaggaattccgcgttcgtagggtaaggctagcttgtaaaaagctcctgctagatacgttacaccgtcctcgtacagcactttcaatctatgtccggaattcaaatactccactacccactcgatatcagctcttccttctgacgctccacttagagcaacttcaaaaaacccatcatcatccgagtaacttaacgaaagctctataagatcaccttgagcgtcgaaagtaatcccctgctgatagtcaacataaacaaaatcaggataaatcactccgtgattcgtagcttcagggccctcaagatcggtaaaatctagcagcactgacaaaattgctgacgtgggtttttcgctgaccggctgagcataggacttgataagtcgcccagcattccctccagcattgatacattggcttatcgtatcgacccattcagaaatgtcttgaagagtgaagttggattctttttgatcgacaacccgcccggacctagcgccaatgtaaaaactactgtctcttttgccgtccaggccaatattatcgaccttcaccatagttaatgcgtaacgggagttactttgactgccgcgcccgccatcaagattctgccctttcaatgctacggactctggacggcgcaaagcccggccaatagcgcgagcgtgagtttccttaatctgattaattgctgttttagcagccaaagcagtcagcttgtcaatatgaattgcattaccaagcctatactgctcctgattataataacggccaccgccgctatcgaagatagcgacaccagaatcaatttcttttaccacaaccacatgcagcctaggctcaaagaaaagcttatttgtaaaaaactttgaacttttgaactcaacataaatcatgacctgcaaatcaagaacttcttcataagatttgactagcgatccagaaccatgcaattcccaatacaatcgatccatcagtagcggcagagagaaatcaacctctttttgtacaaagcagactgacacatgagggatcttgagatcgtcttctggatcaacactattgaggtcaactctttctttgaacttaccatcaaaataactatattttggaaagctctctaagaaagattcaatcaagtaacttgtgcttaacgagctaacaaattcgcctgcaccaccattggcgagatagctatcaaatttttgatatccatcccacatgccctcatttgccccgcggctcaggtcgatcaccagcggttgggttgctccataccggcgtacaatccgacctactgcctgaactagctcacgaccactacccagttcataggtaagtatcagtaacttagcctcagggatgtcaactccttcatcaagcttgtgctggtgaattatcacccgcaccccctcaactttaagagctggaccaactcgcttaaatttattttgcgcctcgtcgatttctagtcgctcgtgcacgcttgccgtgataaaagattgagacaggagttcatggtattttaatatctcttccagactcttgcatttcacgatacatttcacatcttcatttgcacctaggtagcctagaatgcctgcaagcaaatcttcctccctatcaacttgctcatactggggctccataataaccccatcatcgatcgcctctttaaatgtaaaaacataaaaatgatcggtacttacgttcagctcaaacaaatcattacgataaggagttgccgtaaccactactttcatagctgcggactgacgtattatctcacgccaaactggagagggctcagagtgcccttcatctacaataattagatcaaaatcgctttggacattctttaattcttcgtcactcagcatcgtcagcttttgaaagcttgtgatataaactccgtcaccctgatcaaaattagagtccctataggttttctttaactcaaactcttgatcaccaattgtattacggaagaattttttcgaaatctctttaaataactgatctttcacggcctttctgtgacatatcacaagaaccttcaaggcatctgacagatgtgatataagagagataactcctgttttccccgcacctgtcggcaggttgatcagaaagcctctctcagtattattctcttcggcatacctaacgaagctgcgcactgcttctaactgacactttcttagcttttcttcagtagaatccagatattccaagatagtcacagcggtcttccatgtaattgaatagggtcttttaggatcttcaggccacgatgcagaggcgcggcatcaaaacgccattattccatacacctcagcgccaatggtagatacttgatcagcccatttaggagacgatcgagcttcctttcaccggaggacgtgagaccatccttcgtccgctcttggctagggagtcctctaccaactgcacctttgggtcatccacaggaaccaatattcgaaagggtggctgccacgcctcaaggcaggcaattctttaatagatctcctggcatgagtgacaggttggggtgcctttaaaaggatattcttagagatatagcgggaagtaagtttataaaaaatatatgaaaaacatatagttatagttaatttcgactcctggtgcccacgaatc

SEQ ID NO: 3 - DNA, 22479 bp, Pseudomonas aeruginosa
tattccataagttagacccttgggttgaatcgcttaacaacaaaaagattgacaggtagcgattgtaaactgacgcataacatataggattgactgattcatcagggggggcgaatgtcctacaccaatccgcgtcacgaaggtcgtctgattctcatcccgaatttgcaggatgccttcgctatcctgcatgtcagtgaagcgcctcgcggctctattgagtcagcgcttgagggggctgaatccaatctgctttataaatgcgatgaagtcggttcagggaatgaccgtgccctgttcaatttcccatttttgtttagtgctaatggcaacccttggcacgaagcgaacgactacttgctgagtctcatgcgtgatagggctcctgcaagtcgacgcactgatgatgttaggcgtcgtgccagtaaactgttggattacctcctattctgtgaggataacaatctggattggctcgacttttccggtgcccgtccttcgcttcgcccgacttacaagtacttctatcacctgattaaagaaggccgtcgcagtaatcaggtcatcaatcaatataccgctgcggtctatcacttttataagtacgtttccgagcattggcattacctcgatctaaagcgtgttgatacgatcaagcaagtgcggcttatcgtgcagagcccaaaaggcgcgaaaatcatcgatgctgaaaagcgcagccaaacgcggcgtacgccgcctagtagctccgttcctttgggattcgtgcgtgaagatggcgaggatcttcgacctctctccaatcttgagttaggcgcgcttttggaggccattaatgaaaagaaatggtcaacgattgagcggttgattcttctcacgtctctgatgactggagctcgtaagcaaagtgttttgaccatacgcttgaagcatttgaaaggatttacagaagacaaactagtgccggaatgtgcctataaattgcatgccggcccgcgcacaggcattgatacgaaatttgacaaaactcaagttctgtatgttccaaagcaacttgctgaagaattggtcacgcttgcacgtagtccgatgatgaggagacggcgggaaaaatttcgtgctcaattagaagtcagtcatcccggtctgttgatagaagaggacgatatgtatttgtttctctccgatcaaggcaattgttattacatggcttcaaatgatccgcgttacgcaattgttaggtcgccacagacagggcaggtgacggaaacaataaagcgaaaattgcagagtacagcttctagccaatttccaaaagattttacatatcactggctgcgagcgacttttgcctatcaactctaccagcgcctgcaaccgttggttcaagaaggcgttttgaaattaggggaggatattgattttattcaaaaacgtatgcatcacgagtctagggaaacaactgaaaactatctaaagttattcaatatgactcacgaaaaagtcatcgcccaagaggtgtgggagaagaaattgtttaacggtaactacgaagtcatgaaattgacggtccaagaatgagtagtcggcagctgttagagcatcgcgaaaatacaaaaattattacgctaaatgagttggttcaggagttttccgaacctgagcgtttgcgattgcagctgaccgttaaggttaaaaagaagccgttagatattggtagttttgcatatctcattcgtggtaagaataaaagtgttcatgatgatcgcgggacgccattggtgattgagtcgttcgttgaaagtcgtcgtgagctgattgtgagagttttggagtcttttgtcggtctgcgtgataagtcagtcttggcaaatttcttccataccgaatattttattgattggttgaacgctgagggttaccgagaaatattttccagtagcgtggatgctcaaaaggcatatcgagattatacagcgcatctaaatcaaaaaatatccgataaaaagctgaagccccggaccgcgtcaagctaccaaactagagcatccagcctgatcaaattactttatccagataatagtgtccatattcttgctggtgcagtaaggattgttccagatagaggttctgcaacagcaggcgctgctcatgtcgagttgtatagagatgtttgctttgccattgcccagcagtgcagtgattttatcttgaataaaaaaccttacccgctcgtggttggagttagagattatgaagttgttatatttccgtccaaccgaggcgcgagcagcccatttaaggatgctgctccttcatataactcagctgagcggcgaattgctacggccgaagaatacttcgcggccttcgagaggcttggccgaaaaaagccgagaaattataatgtcgcgcgcgaactaagaagctcccaggcatctttggatgcggctaatgaagatgggcgcaactggcatcgtcttaatctagcgagtcttgcggcgaaagcctatgctatccttttttttatgattacaggtgccactccggctgaatttgagcagtttagttacgaagacgcactcaaagttgaaaagtcccctctcaagaaagagttgtcggctgtgaaatttcgggctggcggaaagtcaacgctttacaacattgggcggggctcgggtttgtcgctgctgaaagagtatttaaagctgcgtgcgtggattttggatggtgcgagacatgagcgactattctttgcaatgcctacgtctggtcagcttagaacttgcaaaagctttggtgatcttaacgtgacaagctccttagaaaaattttatgagtttattagcggggtctttcttgatccgactgtaccaagactttcaactcgtaaaatacgcaagcacaaaagcactgaaatgcactctgcacgtttgtcgccgtccacggtagcggcatccctcaatcacaccgaagcggtgaatctttctacctatgcagaggcaacacctgaacagcagcaatccgagttcagcctgttttgggatgcaatacgccacgctgctcatgttgtgcgtgagcgaagccgcaaggctgtagcaagtagtgtcgcaatagcggcgggtcactgcgaggatttcaataagccgacgtctgccactgatgtgggattgattatagagccgaactgccgcacccaatatggttgtttgtactgcgaaaactatttatgtcacggcgatgaggaggatctgcataaaattctgagtttgcaatacgtggtcaatgccgtgcgtaaatcggcccccgatgcagcgcatactgaggcacttttcaaagagttatctatccggatcgagtttatagtcgatgctcttagtgagcgctctagctcggtgaaacagacagtcgaaaaggttaaagctaaggtgtttgaatacggcgagttaactaagttttgggaagtccggttgggtcgctatgaaaaaatggggatcgtattttgagtgctgctgttcagtcgataggtagtcttttttctagcggccagtttccagtcaccagccagccagatagtgcggctcagctgtatgggaagcccgcgtcggattttgttatctgtcgcactgagtatggcaatgcaacggcagtgtacggcgagtctgtatgggactttaacccgtacaggctgagtgcaaaaaaaattggccgaatacgcttcgatatggtgttcggtgattatggtcatgatcagcaagcgctgatcgaagaagccaaatatcttctgtattgtcttatttatttcgctggcggtgggcggattggtaagctgagtgcatctacgattatttcatattgggttgtgctgcgcatcgctatgaagttctgctatgcgcagaaaaagaagtcaatggttggtgtgctgtccttgcagcagctttttaccgtgcctgtttatctagcggcttttgttagtgaaagtaattttgacaagacggttcttagtgggatattgcacggattgattagtgtgggcgaggaacgcctagggtatgttgtgctgaatccaagagtttttgatttgagaagacctgattctaaacagcatccggtaattccgacacgcctttatttgaatttaataaatatttgtggcgacctgctcgatcatctttacttgggtgttgggaatattgattcatttatatcgtgctttgctgatgagtatttcggtcttactccgcaccgtcaaaaatctttgggggttggtggtaagtcgcgctatcgccccggtattcagcaagcaatagaggaatatggtctggctgcggtttttgtcggtgagtttgcctgttccgaaaagagaaagctgcagcgagtccttctcaagatgcagtatgtggtgagaatggtgatacacctatataccggcatgcgtgatcaagaggtgatgcgtatgtcttataactgcttatctgatcaagtcgtgagatgttcagtggttgatgatcaaggttttatgcgcgatcaaccgcaatcagtacacatattatcgactaccacgaagtttagcggttacaagaaagaaagcgcatggttcgcggcaggcgaagtcgtcaaggcggtcgaggttggccaggcgatttgtcgtggtttagcccggctctataggattgaactggatgatcgttgtccgctattcatcaatccgtccgtcctgtgtaaaacgaagaattgtgcagaagttggtgtaacagactttacattgagagcaacgatgggcagtgctttgaaatccttatcgattcaatcagaggatttacaagagttggctcagagcgacccttctcgtgacttttacaatgagccagattttgcagtaggccagccctggccgctgactagccatcaattccgacgttcgttggccttctatggaagcagtagcggctttctctcgttaccgactctgcgagcgcagttcaagcatatgaccattcagatggcgcgctattatgcgaatggctttgataacttgcgcaccatttttggctactatgacgagaagaaaatagacttcgtgctaccatataaccactttgctttcgagttccagatggccatgccgatgtcggtggccaatcagttgattgcagatctgctgttcaaagaagaaccgctgtttggtggcaccggttcatacatgcagaggcagaaagaacgtgttgaagctggcgagataaagattgaagatattcgtgccgatacagagcttcgggtgaagaacggtgcaattagctatcggccaacgctactcggtggttgcaccaaggtgggccgctgcgattccttcatgctcggtgactatactgaatgtttgtcctgcgagggtgcgattatcaagccctccaggttaagtgcggccattgaggatgcgaaaaacgagttgtcaaactacgcagaagactcaggcgaatatcaaattgtgaagggcgatattgagcgcctaatggttttcaagactcgcctgatcgacactgtggagctttagtcatgaagtctggtgaaggaataagcaagggggttggtgcctgtcaggaagctttgcagcgccttctcgatgggaagccttttatgcccgagcatgtagggctagacctatccaaacttaccgcgagcatcgtcagtcatgaggctggatttgaccgtggttatctgaaaaagtctcgcaaaacacatttgccattactcgcaaagatcgaggcttgtcgtgctgaggctgacaagggctgcggctcatcaagtggtaaaagcattaaacgtttagcagataaagttttgtttttagaaaaagagctggcgatggtcagttcgcagcgtgatcgagcgcttacacagaacctccagctatgggcgcgcgtgagagaactggaactagctgagcgtcagaacaagtcacgccgggttcggctacatcattgatagatttacgcctcctcgacagcatcacaagcgtcggggaatgttctagctagtagtctggataatgaggttagggccgacagcattaatgcaatttcaagccttcttgagcgccagcgtcgatcaggtgggctaaagctctgacgcctgaggcagtaggccgcatggatcgcatgcaagcacgcttgcgatgcgatacagcttctcgacggtgatgttgacctcgccacgttcgatccgccctacgtagctgcggtcgatattgcacgccagcgccagtgcatcctgggaaatccggcaggccttcctctgcactcggatgcgttcccctaacgctttcgccaacttatccatgaccgtctcaattcaacttgaggcggcactatcgtgcgtttgcggacgcacaggccacggattataatccgcatttctttcgcgctaactcttctggtgcctcaatgaaatcggcctcgtttatcttcgacaggcgtctgtatgagctgcttcaggagccagggcgtacaacctttacgacccgtgaactgcgcgatgcctatgctgctcgcctgaatggcacacatttccgtatcgccgatgtgcgacgctatgtgtatgagcagatccgtcgactagtgcgcgcgggctgggttgcactggacgaggaccgtcgtgtccgaggacaggtctaccacctgcagccgattccggcacacctacaactggaactgatcgacaacggttttgagagcagccttatggctgccggagtgcccgaaccagacacggcggtacgcgacgtggaggctttgccggccaatacggatttgcagttggaggcgctccacaaggaaatccgcttggactttctcacttcaatgggcgaggcagagcgattcaagctgcttctggacgagatgccgcatttgcgcgacaaggttgaaggcgattacctggaggccagggatcgcagttctcgccttctgggccatttacgcgccatagaaaagaccctcaaaacgctcgcagcgccacgatgagcagatcgctacgcagctggcagaacagctgcatcaccaaggcgttggagcaccttaccgtcacgcagcacttcttctgccaggcaacgccgggagccgggaagacgcgcatggccgcggagctgaccagccgactgcttcagcaggacagaattgacctggtgctgtgctttgcgccgtcctgccaggtcgtggagggttttcgttcgactttttcggaagtgctaggcagacgtctcgatggccagatgggtgccgtgggggcggcctatacctatcaggccatggaataccgtgatgagggattctggcagcttcttgatgactaccgggtgcttgtggtcttcgatgaaatccaccattgcgccggccacgatccgctcctcagcaatgcctgggggcagcagatactgcaccggatacaggatcgcgctgtcttcacgttggccctgtctggcacgccctggcgttcggacgacaaggccattgccttggctcgctattcgtcgcccgaagggcatttgatctgcgattaccgctatggcttgaaagacgccattgccgacggcgtgtgccgatcccctcgcattgtgttgctcgataatcagaaggtgaaactcactgaagaacttggcgcggatagctccgtcaggctgtttcccagcatcgccaagcttttgggggagtcacctgtcacctatgaggaactgctgcgccatgacgacgtgatcaatccaatcctcgaccttggctacagcaagctcaacgagctacgccagatcaagcctgatgccgccggcttggtggtggctaccgacatcgaacacgctcagcaaatagcccaggctctggaaacaatgggtgaagagtgccgtatcgtgaccaacaaaaccccggatgcgcagcaagtgatcaatgcattccgcagcaacacctgccgctggattgtcgccgtaggaatgatcagcgaaggcaccgacattccacgcctgcaagtgtgctgctatctcagccgtatccgcaccgaactgcattaccggcaagtgctgggacgggtactgcgacgcacaggtgaatcggatgaccaggcttggctattcatgctggcagaaccgaagcttcagggctttgcggagcgaattgcagatgacttgccggatgacctggccgttttgagagatgtgcagatgcctggatttaatccagactcaaggcctgaaccgatgggtgcttcgggccatgtcaagggtatcggcgatgctgggttaggtggcgcagaacctggtattgggtcgcaggctacgaacatcatttcgctgggtggctttgcaaatgagcccgcttaccaggtcagcttttcccagcattaccggcagcagctactggcttgtttctgatgctcagccagtcgaggctgctcgaatgatgccggtgtgcatgaatccataaccggccggtgccgcgtggaacgtaatcgtgaggtgcgtatggaggttaggtcgcaggcattggtcgatgtcgttgaggatgtgatctgcgacgtgtgccgctctggaactcgtatccctggctatggccttcaatacggcaagcttgaagcccaatggggatatggatcacagcatgacggaaagcactatcgggtgcatctctgcgagccctgctttttcagggtgctgagtggattgcgtcgggagtgtatggtcaatggcatgttcgatgatgagcagccattttcctctgaggattttggcttggtcagcaagggtaactactgggaaaagagctgatgacaggactgcggctgagcgatcttcttgaacccgtcatgcagcttgcttacgaagcaggcctacttattgagtcagagcttaatagaccagacggcccaaggggcagtggctttaaggcagacgtcgatgttgaaatcgaggtacttctgcgacagcgactgaagcacatcctttttgcgattttgtcggagaagaaacgggctgcgagctatcaggccacccatttagttgggttgttgaccccaatgatggaacaggcgacttcctcaatcgtcggccgggctctgccatttctatcggattgctgcataacgcaacgccagtgctgggcgtggtttacgcccccgtcacgcctagtggtcctgactgcatagcatgggctgagggtgcaccggctttactgcgtaatggtcgtcccgtgaataatgacctgcaatctgcgatcttgggtaagcgtccagccaagtcaccttccgaactccagcattaagggcgatggtgtccgcgtatttttaagcggacgcgttcgtccttaacgttaggatttccatgcgccaacgaagctcttaccccgaaccgttcaaggtccaggtcgttcaggaatgcctacaaccgggtgcgaccgtctccagcgttgccatccgccatggcatcaacgccaacgtcattcgaaaatggctaccgctttaccgagatcagctacccgcggcgttgccggcgttcgttccattgagggctacgcccaaacggccgactgcagcatcggtgattattgagctatcgcttggcgagcagtcagtcacagtgaaatggccagtgtccgatcctgacggctgcgcccgctttgtccgggggcttgccccgtgatccgcatcgatagcatctggcttgccactgagccgatggacatgcgcgccggcaccgagaccgcattggcccgtgtagtggaggtattcggtgcggcgaagccgcactgtgcttatctgttcgccaaccgccgcgccaaccgcatgaaagtgttggtgcatgacggtgtagggatctggctggccgcgcggcgattgaaccagggcaagtttcactggccaggcatccaccgcggctcggaagttgaactcgacaccgagcagcttcaggctttggtgctcggtttaccttggcagcgggttggtgcagccggtgcgatcacagtgctgtagcgccggccatttagcccatcgctttatctgcgctgatcgcctgctctggcacaatcagcggcatgacttcctcgcccaatctcgaccaactgacacctggtggtttcgtcggggatgcgctccaggttcagcccggcaaactggcgcaggatcgtggtttcgtacagcgcttcctccatcgctggatcgctgtagccgaaccagttctgcagcagatgcacacgcagcatcgccatcaacgggtaggccggacggccaccttcacccttcggataatgtggctcgatcaaagcaatcaagcccttccacggcaccacccgatccatctcgatcaggaacaactccttgcgggtttgcttgcgcttgccagcgtactcggcgtcggcgaaggtcatctgcttcatcgggaaactcggtgggtggggtcgcggtattttgccaaatcagaaagtctttttcagagtttccctaggctgacaagccaagcgctggatcgcaaccatccatcaccttatccagctagatctgcctcctccaataagtgccgcacaaatcccggcgggtgcagatttccgggaggtttgcgccagatcagttggagacgcttttcaagccccgggatgggaagagctaccagcgcgccactgcgaacttcgtcttgtactgcggaagccatcaccaacgacacgccgagtcccgccctcactgcttgtttgactgcctcggtgctgcctagctgcataccgctgcgaggcacgcccagttcgccaaagtattcggtcagaagccgtccggtaccgctacccggttcacctcccagcatcggcaggtccaccagacgatcacgttctatgcaccctgcttcagccagcgcatggtcggggctgacgataagcaccagcggctcgacccgccagaggcggtgttcgaagtcggggtgaggtagccaccattccatgatcgcggcgtcgagctggcccgccagtagctggtcggccacatccgggttggcggcgatgcgcagatccacctcgcccctctcatttgcggtcgtcagatagttgcgcacgaatggcaggagaaggtaggtgccgatgttggagctggccccgacgcgctcacgattgccatgcagggcttctagcgcccgggcgtgcatgtcgagcaaggcggtcgcatgcggcatgaaggccagcgcccgtgtggtaggctggcagccgctacgactgcgctgcaccagcgttacgccgacctgctcttcaagcttctgcaagtgctgcgacaccgtcggctgggccagccccaacgccctcgccgcgctctgaaaactgcctgtttgaacgatcgctaccaggctcttcagccagaccggattcaacatgcggcaggctcggccttgggcagacggttcgcagcgttgattgggcgcgcacctgccaatgcctggatgatgttctgcgctgcacaacgttcaatctccaggcgcaccgcgcgcactgccgaccctatgtgcggagtgaacagcgtattcggatgcgcgagcagcgcaggatcgatcagccgcggccggtccgcgcgagcccagtcttccatttcgaatacatccgccgcatacccgccgagctggcctcgctcaagcgccgcgagcacggcggcttcatccactaccgaaccacgacaggggtttacaagcagagcgcccggccgtacgagggcaagcagctcggcgttgaccagatgctgggtatcggcattcaagggaagcgccagcaggatgaagtccgagctggcgaagagttcgctgcacgccacccggcgcaggccgagccgttgctcggtttgtgtatccagagccttcgcctcgtggtactgcagggtcgcgccccatccctgcaagcgatcagccatggccagtccgatggcgcccatgccaaggatgccgaccgtagcgttatccagccccgtgccgtagaactgtggttgccagccctggaacttgccagagcggacgaacgcatctgctgcccgcagatgccgccccagccccaccgccagtccgatcgccagctcggcagtcgggaccgtcaacagatcaggcacgaaggtcagccagaccccgcgggcagtacaggcgtccacatcgaaattgtcgaagcccttgagcgcgcagccgactacacgcagctcagggcaggcttgaagaaagtctgcatcgacccgatcgggcatgaacgccatcatcgcctgagcatcgcggcagcggcgcagaatttcctcgcgcggcagcgtgctgtcggtctggttggtcatcagctcgcaatgtggcgccagcagttgcaggatctcatcgtgtactcggtgagttataacgagtttcggcagcatggtttgtcctatttgaaacgtttgcgcagcacgccactgaaggcgtctactagcgtgaccatggccaggatgaccagcaggattgctgcaacctcctggtactgcatgatgcgcagcgagcccatgagttcgaagccgataccgccggcgccaaccatgcccatcacggtggaggcgcgaaagttgtattcccagcggtagatcgccacgtcggcgaactgcggcgtcacctgtggcaaaaccgcgtgcagcagcacttgcatcggcgtagcccccgccgcccgagcggcttccaccggcgcttcgtcgacgtgctcgatggcctcggcgaagaacttgccgaccatgccgaccgaatgcagacccagggcaagcacgcccggcaaggcgccgaaccctacggctgcaacgaagatgatgcccatgatcagctccggcaccgaccgcagggcattgagcagcacccgggcaacaccgaacacaagggggtgcggcgccgtattgcgcgctgcaacgaaggccaccaccagcgagaacaccactgcgatggccgtaccggcgatgctcatcgccaaggtgtcgatcaaggggcgaatccagcttcgatagcccgaaaagtctggcggcatggcctcgcctgccagggtcgcgatggagggcagcccgttcagcagcgtggtggcatcgagcagccccacgtaccagcaggccaacagcaccactccgaatacaatcgccacctgccccagctggcgccaccaaccgaggccgaagcctcgaaggatgtgctcgcgttgctctgcaggcagcgcctgcacgtcgtaatgagtagacatatcggtgctcacatcgtggcgaagtcgaggccgagcagcgatcccatgttgcggatcacatcgtagtcggcgtcggtgattggcgcgaaggcctcggccttgaagttgcgcagcacttcgggatcgtcgataccgacgaatacatcccgcaccttggttttcagctcggggctcaggttcgagcgcatcgcccaggggtactgggggtattcgccgctgtaaccaagtactttcaccttgctcggatcgattaggccacgttcgactgcgtgattgaaaattacctccgacagcccacccgcatcggcgttgccgttcgccacgttgacggcaacggcgtcatgcgtgcccacaaaatgttgttcgtagtcctgcccacccgtcaaaccggccgtctcaagaagcacggctttgggaatcaaatggctggacgtcgatgcccggtcaccataggccatcttcttgcccttaaggtcggcatactcattcacgcctgacgccacattggcgataatcaccgagcgataggtcggcttgccgtcgatgaccatggcagcgaagggctcgatgtcgcttttgcttttggccatgacgtaggacagcggaccgaaatacgccaggtcgatacggccaaagcgcatcgcctcaatcatcgaggaatagtcggtggttacgatcagctgcaccttcttgtccagatgctcttccagataatccttcagcggctggttacgcttgatcagctcggaggcgttttcgtccggcagcagggcaacctttagcacatccggatcggcatcggccgctagggcggacaaacttgaaacagcggacagcaagcaagtcaataagagcgcggataagcgtttcatcgggacatctccagtgaaggttcgagcatgacaggtggttcagccggagcattcgctggctgagtcgtagagcggcctgcatagatgcgctcaagctgcgcatcggtgagttccgagggcgcggcatcgaaaacgatctgagaatcggccagcccgacgacgcgatcggcgaagcggcgggcatattcgagttgatgcagcgaaacgatggcggtgatgccgtcttccttgcagatgtcgcgcagcaatccgagaacacggaccgaagtggccgggtcgagactggctaccggctcatcggccagaatgatcgccggctgttgcgctagcgcacgcgcgatgcctacccgctgctgctggccaccggacagtttgtccacccggcttagcgccttgtctgccagaccgacccgagcgaggcaactgagcgcaatctcctgatcggcacgcggcagaggaaacagcgagcggagcgtgttgtgaaaggccagccgaccggtaagcacattagccagtgcgctttgacgttcgattagctggtggtgctgaaagatcatggcggtacgccgacgatgctgacgcaaggccgagccgctgccgagttcaccgagttcgctggtgacactgccgccagtgggcgtgacgagtcgattgagactacggagcaaggtcgacttgcctgcgcccgagagaccaagcagcacggtgaactcaccacgccgaaatgcaatcgaggtatcgcgtagggctgtcacgccgcctggatagacgacgctcaaccggtcgacccgcagcacggcgtcctgtatcggatggggcgtcatttgatcacctttcgcaatattgctggccgcacaattgcggttcgcgatgcaaagggtagaaattccttgttaacgcactgtttctaaaggatgacatttcgatgaatacttcgaatctgccgtagcggggcggcaagcgaagccgtggaagaacgggcgcaacgtagcgtctttcttcacgcgggatacaggaggctttgattgatactgctgcggattcgctacagtaacgttgggccagaacgtaatgccatccaagcaagagagcgcacactagggaaactctgaagaagacttccagattttggcaaaatacccggattccacccaccgagtttcccgatgaagcagatgaccttcgccgacgccgagtacgctggcaagcgcaagcaaacccgcaaggagttgttcctgatcgagatggatcgggtggtgccgtggaagggcttgattgctttgatcgagccacattatccgaagggtgaaggtggccgtccggcctacccgttgatggcgatgctgcgtgtgcatctgctgcagaactggttcggctacagcgatccagcgatggaggaagcgctgtacgaaaccacgatcctgcgccagtttgccgggctgaacctggagcgcatccccgacgaaaccaccattctcaacttccgccgcttgctggagaaacacgagctggcggccggcatcctcgctgtcatcaatggctctgggcgaccgcggcctgtcgctgcgccagggcaccatcgtcgatgcaacgctgatcaatgcgcccagttcgaccaagaacaaggacggcaagcgcgacccggaaatgcaccagaccaagaagggaaaccagtattgtgtgtcacgaacacaggtcagatgacctgtgctgctgtgccgaagatggaagtaggccttccgaagtcggcttgcaggagcggacttcaaaccacccggtgctgctgcatccaaaaggtgtggtggtgagcgaccgaggaaaagtcatccctgaggatggcaggtgagtatggagaagatgagcgaaagcaaaccgtccgatgacgcatcgttatgcccaaggtgctgccgaaactgaggtggagtactggcttcaggacaagtcggggcgttacctgcttacggacccgatggcagccggtgtataggcggcatgatcttcatacaggctttggtacggaacgtgagaaccttgttccagatgcgaaggaaaatgacaaatggccaacaccatgaggaagaataccgatgctggaacgaggggcggagcttcccgtagtagcgatgaagcctctgtaatggaggtggagcgaaggggcggcgttatccggccgacgagcgttgccaacctccggggatgagtggcgtgagctcggcgaaaccttatgacatagcgaaacgcacggtatgggacgcctaccagcaggtcagggccaaccgcggtgctgccggcatcgacgatgaaaccatcgccgatttcgagcgggatctgtctaagaatctctacaagctgtggaatcggatgtcgtcggggtcgtacttcccgcctccggtcaagcaagtagaaattcccaaggcatcgggaggcacgcgcaagctgggagtgcccacggttggtgatcgtgtcgcgcaaaccgtggtcaagcttctcatcgagccggagctggactcgatcttccactcggactcctatgggtaccggccgggacgatcagcgaagcaggcggtggcgatcacgcgtgagcgctgctggcgatacgactgggtggtggagtttgatatcaaggcagccttcgatcagatcaatcatgggttgctgatgaaggcggtgcgcctgcacatcaaggaggactggatacttctgtacatcgagcggtggctggttgcgccgttcgaaacggatgacggcatgcgcgtcccacgcgaacgcggcaccccgcaaggtggagtgctcagtcccctcctgatgaatctgttcatgcactatgccttcgacacctggatgcaacgtaccagccccaactgcccgtttgcccgctacgccgatgatgcggtggtgcactgccgcagtcgaaagcaagcggagtacgtgatgcgctccattgcttcacggctggctgcctgtggcttgacgatgcacccggagaaatcgaaagtcgtgtactgcaaggacagtaaccgtcgcgcaggttatccgcatgtgagctttaccttcctcggcttcacctttaggccgaggaaggcgctcagcaaacaagaccagctcttcacgagcttccttccgggagcgagtgcggatgccttaaagcggatgcggcaagcggtacgcaggtggcgactcaatcgccaaacccacgtgacgctggtcgacgtggctcggctctacaatccagtgatacaggggtggtggcaatactatggctcgttctatcggacagccatgcttggcatcttccagcacattgaccgcgcgcttgaacgctgggcccgacgaaaatacaaggcccttcataggcgcaagcggcgcattagccaatggctggacaagatgcggactgtggtaccccggctgtttcatcactggcgagtgaccgggcagcaaggttggataacgggagccgtatgacgcgagagtgtcacgtacggttctgcgagcggctgcgggggcagttcccgcggccgactcaccatttcggcagtgcgacctgaaagtcgcatgggtttctgttccgcaggttaacgcccgacggaaccgactgttccaccactcgttccctacccagacaggcgtggccggtaacagccgggtctgaagctctggggacaatgtaaccgccgatatttcggtaggtcgaaccgcgaggccagactgaatctgccagcatcaaggcggagaggcgctagggatgaacaggtacccgccaactgcacgggggtgatggtgctcgcttggcgactggcttcttgctggaggttagagattgcttcggcaattgccttggtctgagccacatagctgccggataggttggcaatcacaatgcagcaacgcggtaactccagagcggcgctcatcaggcagctgagtgtgtaggtgctcacggtagccagcgtaccgccgccgatgacagtagtgctcgcgttttcaaggtagggcggcaactcatcgagcatgatcagggtcggtttgtccccgataattttcttccagccagcctgatcgaccgcgcgagggccattgacccagtagggcttgatggcttcctcttcgcctagttgggtagtcgcgaatgatggggttgaatgtgcatgcctgcttgactgtcttgagcatctgctcgactccctgagaaatacttaatcgttgctcgactgactggagggtggggtgggctgcggaatggaaagctcctgactcacctgctgcagaaaccactcacgcatggtcaacccacgcgccttgagtgcggcgtagatctgctgcttttgggcaggatcaacctcgatcacaacgcgattgctagttttcataggcatgggcacctggcttaggtttgtaacgtgacgtgatgttatgttcgaaggggaggggctggaagccctggcgtacattaatttattttctcttttaggagcatcttgaggtaggcccccgtggcctggccgttacttctgccaagtactaaaaacggggtaccggccggtcatcatggccttcgactgctcagggttaagatcctgttgttgctcctgccagttgcctgatcagacgaaacgtccccggtatgagcggcgggctgctagtccagatgccgactcgcctggggaccagcccgaattacaccgggacttatgggctgagtgggcagctatcgcaggaaccacagcaaggcttgccgtgcatggagtcccaatattgccgctcagcctcttcccagtcccgcaatgcgaaagccagttcggtagcctgctttgcatggtcatggcagcgtcgaattcgtttaggacggcggcgtccatacaggccgcagaagcagcgccttttttggttgattacccgccgggacttttcccacacgctaaacaaaggcactgttccggagatcacatccaagataggtcgctctttggactttctgcgcttgagccctagctgatttaccgcaagatcgttagcgattttgccactgattgcgctcgcagccttctgcgctcgcagttgatgtcgagctgcgtcgccgtgtgcccacgcggaaccattcggccatctgcgcagagtgcgagcgcgctcttgaagctttaggtatttgtagattgtctcaagccaggcacgagcggacggctcgtctgagacaggaagcggattggcgcccgcgtaaaacagacagaacgtaccatcataattgatgtgccgttccgggcaaaagcctggcaagtgatgtggtgtgctttcgcgtgcttctatccattcaccgtcttggcgtaaatgcagcttgtaggggagcgttctcccgtccaccagccgaatcggaagatcaagcgttgctgtctgcggaacggatgttacacaggtacccccgaaatctggggcgacctgtgcaatcaggtcgagcgctgtgctcaacggctgccgtctactttctggcgggagtggggctgcacctgacgctcatctgcgcgaatgatggcggcggaacccgcataggcttccgagcgagcttgcttcgcagatgcgtccccatcatctgccagggcttcggtagcttcgttgtagtccaggtgtgatgtcttacgactcttcccaaacaggttctgcacagctttcgatgctgcgtcgtaagctacttgcccgatcgcggtttccacccccgaacacgcgcattggcgtttctcagactcgatcacgctacgcccgatagcgcacctaactctattacccttggcgcccaggcgcgtgacggctattgggcccagatcgaagccaatcgcgaggccgaggtcgccggtttcaataccttcggcgttcagccgctcaattgcgagattgaagctgctgcgcagtgcacctgctagccgtgtggcctcggatactgacttctcttcgtcagtagtatgcgcggtgccgtcacaggatagggcttgcacgcagtctccgatgaagcgcacccggcgcccttcgaagtcggaagtcacgacccgctccagctcggagcggatgacatgcaaagtccgcacgacatcgtcggtcttctcgttgatgtgatcggccacgtaggctgtgaagccatcaatatcggcgtagaggctcaccatctcctgtcgcttcgagttggccggagtcagcgagtaaatgtccatatcacgcaggggtggggtttggcgggaaaactggtaaccgccaatggggttctttttcagatcctcacgccactcctcgacgatctcgtcggacgtgacatccagcttggccgcatcctgacatgccttgatctctatcgcggttagggcagatttttccggctcatcgctttccgcaaggccgatggccttacgagcattgttggtcagatagatacccctggccttgttattactggccagtttcgcggcatggttcgctggatcgcccaggaacaagggttcgcggtacccgctgcggccattgtttacagcaagagctaggccggtatcgatgccaattcgaaccttggctgctgggatttgctcatcgtcgtcgcccgtctctgcaagcacgtcaatgatcaattgcgcagtcgcaacggcgcgttgaacacgcttggtctcagcgccggactcagtgttgtacggcttagtgaaaagggagtgcagccgctgactgtggaagtcgacgcggcgcgcatcaaccttgttgagaattcgcttgactgcccggtagtgctggtcaagaaagcgcagcgtgcgcttgtgacactctgtgccctcgactgcagtgatgttcagcatgtcctcgagattcatgatgtccgcatacatgtggaccccatccacgcggtacgcggtactggtaggaatcgattccaacgacatgtcgcgcacgtaatccttgatggtgatttcctcaacatcagcgatcttctggtctatgtgttttgcagcgcgatcatggttccagctcttgctcatcgatcactccttcgggtgattgggcgcgctgcaatgcggtaggcaagcgcatgccaaatttgcttgttgacagatatccgttacttcggtcctagcttgttgaaaatggtgcgtagctgattgcaggctggagataggctggagggcagctggtcttcacttttcgttaggcgatatccgatggttgtcagccctttcagatctgacggcagatgtacctcgtcacccctaggctcaagaaggaaggttcgtgccctgccaagtcgtcctacgaacaggccaagctcgaaaatgacgttgtcgcgcggcgtattcttggtttcctcgcgcattgtgacggagtcgtccggctgtgcgattgcgatggcaaaatcgcactcgtccagttgctcttcgaggctttcaagggcgtactgcgatgcgcggaaaacgccttgtgtccaggtctttacgaagaacttgtcgtgctcaaggttattctcgattgcccgggcaatagggagtgcctcgaccgagcaaatgatgaatacgtgggatgactgatgggcaggaagcaccatgtcgtttcgctggtgtagtcgatcgaccagttgccgagtgacctgtcgccaaaccgagggatacgcgtccgcaatggacttgaagtctgccgcgctgaccttcaagacaatcgagggctcggtggccagtacagtagcagagcgcttcgctgttgggaccagagcagccatttctccgacgtgatcgccgccccctcgtgttgcgacttcacgatcatggaccttcacctggaaatgccctgtgatgatgaaataaacctcggagtcctccgcgtcctcggtaatgagcacagcatccttagcgatctcctccagcgttcctacctctgcgaggcggcgtgctaggtcttgatttccgagtaccagcttctgctcaagcagtacttcctcaagaacggcgcggcctgacggcccttcaaagcgatcgatcaacttcccagtagtcatgatggtgagcattcccttgcgaagaggttgcgggggcgttcacagagaaatggggacgtgcgtcaccctttcaaggggcgctgaagaaaagatctgggcatggcgggcgctcagggacgcaggttcaaactctgtttgattgcattcgggagtagtgggccgaatgttcagtgtcaaacattttgtgctgtaagacctgacgtgctctggtacacctgtcaaaccttctcttgattggcgtcagtttttgtcaatcaatgggggtgagtttgacggtcaatggggagtcgccgaaatagcatcataggtagggattacgggcgatttggcggtgtcaatcgaaggaacgtaatttgatacctca

SEQ ID NO: 4 - DNA, 16195 bp, Pseudomonas aeruginosa
ctaatttcaaggacttagcgcaacgcttggttcagtcccacgctccagtggtacagtttcggtacagtgccggcactttgctactggagatgatgatggcgacaatcgtaaaaactccctctggtacctggaaagctgtcatccgcaagcaaggatggcccacggcttccaagacctttcgcaccaagcgtgatgccgatgactgggctcgctccaccgaggacgagatggtccgcggcgtgtatctgcgtcgctccccttccgaaaagaccactctagagaaagccctgggacgctacttggaggaagtcaccccgaccaagaaagcctccacgcaaaaagctgagcagacgaaggccgccccgctcatccgccacctcggcaagtattccctcgcggccctctcggccgacgtgatcgccgagtaccgcgacaagcgtctgaaggaaaccgtccgcacgaaatacaaggaaggcagcgatgtcaccccgagaaccgtcagcgccaacaccgttcgcctcgaactagccctactcagcaacctcttcacggtcgccatccaagagtggcgaatcggcctcccccagaatccggtgctgaatatccggaagccaagccccggcgagggccgtgatcgacgactcaaccccgatgaagagcggaagctattccaggccgtaaacgcctaccacaaccccatgctcggatggatcgtcaggatcgccgtggagaccggcatgcgctcttcggagatcacctcgctacgtaggcaccaggtagatctcaaaaaacgcgtggtgaagcttctagacacgaaaaacggggaaagccgcaccgtgccgctgactcaagcagcggcccaagcctttaaagacgctctggagaaccccatacgccccatcgataccaacctcattttcttcggcgaaccaggcaaggatgaaaagagaagaccctatgtcttctcgaaagtctggaatgagatgaaaaagcgactcggcatgacagatctccggttccatgacctcaggcacgaggccgtcagcaggctcgtggagagcggccagctcactgatcagcaagttgcagctatcagcgggcacaagtcgatgcagatgctcaagcgctatacgcacctgcgagcggaagatctagtcaccgcactagacaacatcgaccagtcgcgccagggctcaagacctagcgcctgactcaagtcaacatccggcatccctgccggcgctggtggccaggccccgggcaaaaagccgcccggcgcctggcgcggcatccatgcctcaccagctcgattgaagcgagcaagccaccacgagactatttcgtttcgacgaaacagggcgtgtcgggcacgaaggacgagacacgctgacactggaaatcgagacctgactccttcagcatttgggccacaaacgtcctgaggggcgaaagccagaacgcgtccgacacgcgtatctgattacaaaaagccaaggcgatcgcagttttccaaggaggagcgatggggcagatcaagagtgatgtattgagtggcgtactagcccgtcgacccgcagatagggcgctactaaccccattcctcaacggctttgatgtgacctggggagccagtcatcgatcattcggaaccgacgttacggtctatttcctgcttcccgaaagctttatttctcagggattcggtattgaccaagagatagctcttttcgtaactgatttccctacgctggagcctcgtgttcttcaagcagttgatcagacgcttagagaagcccccgccaaaggccgcgttgaacaatcgattttcttcttgtcgtcgcccgcagacaatgggaggcagtggatggccgactataccgcggccaatccagactcacggctcgcagtcgtattcaactctaaaagcctagttggagcagctggaaacgcttggtacgtacgaaatcaaatcggagagcaacttttcacgcggaatcttttcgacaaccagcttccgattgattcagatctgttcttttttggtcgagaccagctggtcgctggcttcctcgatgcaattaagcggtcgcaaaatcgtggattgtttggtctgcgaaagacgggcaagacatccgtactgtacaaaattcagcgaatagtgagtagagacggtattggtaacgtctactactacgacgcaaagctgccatccatcaggtcactcaagtggcatgagctacttgcaaagatatctcgagatattgctcaggcgaacggactttcaatccccgaaggggtggatgaccccaggcgtgtttcggatgttttaatgcatatccttcgactcacgccttcagataaaattgcagtcttgattttcgacgagattgaatttatctcgcctgtcgctaaggatgatgtccactggcataaagaatttattccattctggcaaactttatgggctatacaaagccaagttcgtcgactttcaaacatagtcgttggagtcaatccgaaagttgtggaaatggacacggtcgatgaagtccagaatccgatgtttggcattattcagccaacatacctgaagggatttgcgcttgatgaacttaaaaacatgctcaaattcttcgggaagcgaatgggtatagtctttgatgcagatgcacaaacctatctcctgcagaggtacggaggtcatccattgctggttcgaatggcttgcagtgaagttcacaagtcgttagaacgggctgtagtccaaaggccggctaccatcagcgcgagcgacttagttaagggagaggtgcagcgcgacgaggagttacttttctactgccgtcatgtagtaagcgaacttcaaagattttacgccgacgaatataagatgctggagatgctggccagcggtcaaatcgccgacgttcgagaactttcagatgaacccgagtacaccagacatctcagagagtacgggctgttgaagtttgatacccacaaccgtccatcttttgagatacccgttgttggcgagtatgtaggcagagagcttgccaggcgcgagaagcgccagctcgtgcgaaaaattgtgtcggaaggcgatcgtattgactgggtgaagcgacgcacacagacagttagccgagagattcgaactcttgccagagagattgacaaagcgggacttccgaagctttttggtgacggggacttcccagaagcggagaggttctcagcgattctgccagcgacagatgttgacacttttgtagtttttataaatatttgcaatcgttgttttgtcgagtctattgagcgctatggaaacaaggccggtatcaaggggtacttctggagctcgatcaaaaccacctacccagatctttggcatgcactccagcggatcaaggtatatagaaacaatgatcttcatttggagctgaacgtaactgtagaggccgagctgaaacgctaccttgatatagacttggaggggcgcacagtttcacaagtaagggagccctggtttgctcttcagcaggccgtgcttgacgaattgatgctatgtatccagtacgagctagcccgccacagttagctataacaatagccttacctagcgagaccgccccgcaataaattgtcaggcgacccaaaagttgtatgggtcgccctgaaaaagcttccaagagatgcatcttcaaggagcagctttgctttcgctatgtgccgatccctattgagagatgaggctcgtgatgttaaccgccaaactgacgacggatactacgaaacatctcttgcgcgactagggcgagcattgaagttagccggtttacctttcaatatgtatcggcgggctttgtaaccaggtgatactgattgcgaaactttgctcgcttaagctcaagtgtcgctctctctgaactgcttaacgaggcttactttcatgatggagcctgtaacgagtatctcaagcgccctgatcaccttggttagcgcaccactaacccaggcggcgccagaaacactgatcgaagtcgccctgttcgtctggtacgaccccaaccccctcccctcgctgaaacgcaccctggagatcctggagggtattcagcagcgccgcgctaggttcattctggatgtaatccggcgctacccctgcattgagctcgaacgccagcaggcactgtgcgagctggcagacctgaaagttagttttcaaggtggcccgctgacggatttgctccgcgcctggggcttggacgaggccgacatcccgaacaccaaggcgatcctgccctaccagacccggcactacgctgccgagcggcgtaagtgagttaaccgaagcacggataccacgctagcgcggagcccagctcatacaagacgccaagcaagccgcatccgaggcgagacttcaaaaggaaggaaaaacggtctaaaatccgctttgggaaaaatggcctgaggcggaccttatgaatacacaagatgagatcctgagctatctgcgcaagaggatcccgcgcaaccacttcgaagaaatcaagaacgtagtcccagtcgccttcaagaaggcccatgacgcgggcagcgaccttgtacatatacccaaggaccggaaacgcgctcaggatcgatacgcttatattcaggacggtctagcaggtttgcagaaaacctggtcttcgcaggttgttccgaccaacccgaagggtgagttttatacgctgatgaacgctgagaatataaggttaacagcggcaatcaagccatggaaaaagaaactgcgcccagcaaaatatcggctgaacaactcaaagctcaacagattcttaatgtcaccgcagcttgagctactcggcgcgggtgatattactgttgatattgaaaatatcttgaatgcgattgtcatcccgctctcgccaccatggcatttggatcagtccaagccactagatattatcttggctgtaccgtacttcaatagctgctcggactatcacgtctggtgcagcctggacaaatttatcgagggctatgaaaaagagatcgcaggagatctcgaccttgcatggcctgttattcgtaagcaaatgcgccgcgacgaaggcttagacgagtctacgggcgaagaatgattatcgaggtagtgggcaatgaggacaggaattttaggtttccagtctgaacgccttaagcagctcagatcagcctctgggctgacccaggagggtcttgctgaattaataggatgttcggctgggaatatttcaaaatgggaaactgggagctcatacccaacagctcccagctttcataagatctgcgagttttttggcgtctctgaaagttggctacttgaaaagccgataaagtcaggatttctaagaccgagtttctttaggtctcaggtcacaaccccaaaaatatcatgggatgtcgcagacgctagactagattggcttgaagagatttcttataagttacaggaaagccttgagtttcctcccataaacatacccgcttataacggaaacaatgttagagagatcagtgacgaggatatagaatccttggctgatgagtgtcgcaaaacctggcgtcttggtgatggaccgatacagaacgtcattcaagtcctagagaactttggcgccgtgacagccagatgcactcttggcttcctaaaaatggatggtgtatctcgatggtcagaggtcgacaataggccatatgttcttatcgcaggcgataaggctagcccgatccggaatcgatttgatgcggctcatgagcttggccatttagtattacaccgtggggtaggatttgatcaggcccgagtagactatcacttacttgagaatcaagcccatcgatttgctagcgcatttctaatgccatcagaatcattccctctagaggtgaaatggccgactttagatgggttcttggctctcaagaaaagatggaaagtatccatcgcagccatgattaagcgctgtcacgatctaaatgttgtagacgatgaagctgttgtgcgtctttggaaaggacgatccgcacgtggctgggtaaaaaaagagcccctggatgaagagttcagctttgagcagccgaagctaatttctagaagcgttaagatgatcattgaaaatgacatacttactaaaaaccaactgaaagaaattcttggcgttccttcggaaaagctggaagagctttgtgccttagagaaaggttacttccaatcaaatgacgagcagaaaattatagacatccgcatccgagccaatagccctagggagactcatgcaaggagtacctctggagtcgttcttgggttccccaaaaaatagctggagaaagaatcttgcttatcaatgaaagatgcccggaagactccactgagacttgctcattctgcggagagaacaccgctaaagcgctgtggatggggaagagtgatatctttgtatgtagccattgcgctatagagcatcttcctcagcttatggcagacgccatagtcggctctataagcattgagcagcttcaggcctctaccggcccgacatgtgagatcaacaaggaattgcgcattagagaacggtttcatagtgccttcagtagtgcactgattagaaagattcgcaccacctaaagttcttcactaaggcgggccggctcattaattagaccagcccgcacccacctcgataaccagtactcccgagcgacgaaacgctcgcgatttggctcaacacacccaatattcgttctacagaacatattgaggccaataaggaatgctttctaaattgcaaacccgagaccaaggcagctctgctgccgcagccggtcgagggttggtaccccgaacccgagccatggcacgtaaacggcgaggtcatttggggctcagggagacccgattcacttggggagatagagtccgagtattcaagacaggacgtgcagctcttacctcgacgggactcaaaccgccggccccctgcccgatctgaaactgaccatagttgctggacgtcttgtttacgcagtggcctagtgcggccgagatctcttcttcactgagcccggcccgcttccagtcactagccacggcatttcggaggtgatacgggcagatccggaatttgagcctcggccatagcttttgtccggccgacgacagcgctgcacgccagttggtagttttctcgatgtcgacaactgtctcgatcttttctgcgcccgaagcggcatttctgcagttctcaaagagagccctcaccaacggattctgatcgactcgataggtgatttcacgccagggctggcctttctcgtcagtaaccttgatcccgttatcaatacggacagtcaacagtccgctctctttggaacaaatcactttgacacctttctcaagctcacctggtcgacatcccgacactgcctccgccagaaatgccagctcgtacttgcttccctcaagttgcttatgcagctgatcccgccaattaccaggtagatattttaagtcagatcgttttgacttcctccttaccgtattttcgagaggacactgccctttgtgcctttcaacaatattcaagatcccgatcacttcttcgatcgctgccacttggtatctgagggcgctcatatcacccacacgctgagccgcatcttgacaccgcaatgcctcctgaagctgagcacgacaacagtgcattgttgcggccactcttcttcgatatgtggacttactttgagtcgcacagattgctgaccatagtttctctggattagccccttcatcgccaaccattcggttgtattcgcgaacataaccatcgtcagtcgacttggttagtcttttggatggcagttccttcattcgttggcgtgctgttcttacgagctcgaaaatctcttcctgggtcttcatagcgcttttccagtgacctaagtcgcttgagctggttggctgaaagggcacctttcgctacgcgaatcgccgttccggcgaccggcgcccacattcacgcagctgcgtgaatgtgttttctttttaggtcacttacgacctatcctttttaggtcacacatgactcatcggcttttaggtcacatgcgactttttctttgtcttatccttgtacatcttaaacaactttgcttgaatactctcatcgcctatgtatggagactttcaatgtcatcctccggatatcaagttggcttatctgctggttacgctcactctcgcgcaacccaagcgtcatacgaatctgctattgatcaatggcgcttacattcagaggagctgaaacttcaggtgaacgccttgaatgaacgcatcgaaatcatgcaaggccactttgaagcgaataactatgttttgcttctgttgttggaggagttaagaaagacctctcctaactctccactactggcaaaggaaaacagagactcgcttcgtcaggaggcctttgataaatatctggaagatcgcggatatgagtggccaagttcacgcccccggaggtaattaacctccaggaggcggcccgcccagcagtgtgttgttgtctggcatgcttcggccaggagtagagttgtctggccccttggagtgttttgccccgccacccagacctcccgcggccccgtgctttgtttccctgactcccgcaacaaacacatcctggccgctgtcgccggtccgttcagcatcggcgataccaccagtcgatccattgccgatccagcgcaggatgttgtccggtacccagtggatcaaactgaagacgatgtgcaccacggtggtcatcatcaccacgtagatggccacgtaggcgatgaagctgacgatgcccgtcatgctgtcggcctggatccccgagacaaccgacatgaaggccgcgttgatgtagccgacgataggctgggttagcagcatcccgccgaggagaccgaacagcatcagggccgggcgcatcactagcgacaggatcatcatgtagccttgtcccgctcggccgacggcattgtctccgtctgggtggatgtgggccacagcgaacagcggggctgcaatgaccgactccagaacaagaacgaaccagtttacgatcgcagtcgtccaggtgatgaaagggatcatcgggacgtaggtgctgagcgtcacgccgagagcgaacagcaaaatcaacagcgtggtgatcaaggtagagagaaactggaagaccgcacctacgtcaaagccaaccttcactgtggcctgtgccgcccaggagttcgcgacaccagtggcactggccatcgctgcgagcatcacttcgccggttgtgacgatgacgtcgccgaagctcttcatttggctcatgtgattgaggttggagccggcgatactttgggtcatctggttgatcgcccccatgaacggtgcagacatcatcttcttgacgtactcccaggccccttcaccgtcacggggctcgcgcacattggtctcggcgtagtaggtgttccgcaccgagtcgacgcggtgcttggcatactcgtcggtggtgagcatgacgtcggcgtaggtctgcagtgtctccttggtctccttgtcgacgatggcaatgggctcggccgccggcaggccgttcagggtggattgcatcacgtcgttcattttgacgatgtggttgtaccaggtgccggcgaacagccagccgccgtccttggcggccttgaggaagtccgctgcagctcgatcactggtttgcatcacggcggtcttggcggcggaccgaagcgagttttcgtaggtgttcgctgcggcgtcgatcacgcccggggccggcttttgcccggcgacgatctgctgtgccgtcggccggatatcctggatcatctgctggatggctttggcgtgggccgcgagaatcggttctttgatgaccttggtgttgctgttgccctccgaggcctcccaggattgcttccaggtgagggcgccgcacacatcggggttgatgtaggagttgtcgttggccttccacttgtagtcggtgacggtgtagctcgccttgttgtacttctggaccatgttgatgccaccgtagaccggtatggcatcggtgatatcgacgtcgatctccccggtgttgacgactttgcgggcggatgcgacagcctggatgcgagtcgagcggccagaggcctcgaactgcttgttcatcgccgcggtgcagacttcgaacttcaggatattggctgcgagtggtcgggagtctggaatcagcggccgggacaacatgccgtccttgccgatctggtcgacggcctggctccagattgcatcccctacacccacgccctgtatcgcgagccagagcaccatgatctggataagcgagtagccatgcccgagcgggagcagtaaggcgccgcccgcagcggtacgcaaggggatccaaatgtcactcatcttccgaccgaggacctcgccatcctgagcggagtccacggtgcctttgatcgtggtgtaggcgatgaagatcatccccaggaacatcacggcaccaccgaacacggacatcatgctgcccagcacgtcctcggtttcaccgccttccacattcccgcccgagtggatggtacccacgatggagccgaagacttcctccaggaagtcgacggatgtgtcacccggtggcggggtgaactggttcagtccacccgaagagtcagcgtgcgctgctcctccgagaaaagcggccaggaataggcaaagcagcagcgattttctcatctggctgctctccgctgggctggcggtaaaactaaaggagcggaaaatgcgtcgtgcacataaagcagggcgtacgggatgccggcgagtgcataaaactggctgccgccggacaaatactgctgcacggcataaagggtcagtacagcaattgtggggaatacccaccagcttggtaatccaccccagatacggtgctgcccgagcggaagccccaagtttgttaaaagcaacaaaagataaaatacacggtgggtaaatctagtaaagcctggcgacgacaggaagatagaaaaactcactgttggcatgcgagcaaccccgctatttcaacagtgcgatatagcactctccgaccaattttaacccggcattcacaaatacctttggccagatcagctttacgccagagaaacgtgctgaaccccctaaccgacatccctaacagctcagcaagctgcttttgggaaatcaaggggccaaatcgatttagaaaatcttgttcgaattttgctttctgctgaatctgctggggcatcgcgctcatgggtggctacctgcttaacatctcgacaagtgtctaaatgctctcggtagcaacacattacgtcaacaagcgtaaaccgggcgcctttacggccgctcggggtctatcgcagaaaaatcctcattaaaccccgagcgaaatattattgacccgtgctttcctcggggtttaatccaacctaaagcaccaaaaccccgaataaaatttattttaatcgcaaacagtggatcaattaaaaagcacaataccccatatacattcaccatacgccccatatcctttcacctttcaccccatattctttcaccattgccccataaacattcacctacgccccatatcctttcaccttagcgccccatagacgttcaccttccgccccataagctttcacctttcgccccataaacgttcaccactaaataaaaattcctttaataacaattctttacgcacagctaatctatccctttgtttgtatgtttgttctctttttaaaaaagaaaaacaaacatacagacagactggacggagatgaggttgggaagtagagtaagaaagcggtgctggttggggcggcaaccccaaccagcacctaccacctgtgaccgaaggagggtcccaaatggctaagaaaactatacccgatatcgtgctagacgacgccttggttgcggcaaatcctcgcctagagaacccaaaagccgaatccgagctccaagctctgagaaagctacttggcccagcatgtgagcaagtcgttaaggcatatacggcggttgctgaccaaaaaagcgcggaacgcgccttcaaacacttcgtgcaaaacttaatttcggcagcctagccctaactcataaaagccccaccgtcactaagcgagacgtatggggctctgagattcaaagctggcctttgtaaatgccaaagtctttacgctgagccaagatagcctttacaacgagcaacaaggtaatacccgacagcagcagaataaaaaccatctccctaaaagcagggaaaaggtaacttagatcacccctagcttttaagaccccaagggtcatcaagaccgtacacaacacaaccccgataagcgaacccgcaatgataatctctctctgccgcttatcgaacggcgtgtcctgatgaaatgcgcttataccatctcttagagacgcaccaaataaagcaaggccggcaaaaggccaggccactaaggacttaatttcttcccttgttcccccgaccgaaaagataacaaccatccaaacagcaacaggcaacaacacaaaagcaacttcataaaacgccttcaccgcaactgaaaagtaaatcttaaaccagctccccacttctactgctctccaattaatagccttactacatacagatcgatttactggctcagagcgtccaccaactcaataactcgcccaggaccctctctccgaaccgagcttgcccccactcaatcgccgagcagtagctgtcgcccacaccgacagattccagaatcctgatatcacttgctcctgtaagcggtgagctcaacaggccagcgaccagcagagcgtcatcaactgaggacaaaacgtcgtggcactggacaccattcataagaaaactcaccgcgcaggccccaacccagccagtgccaaccctggattccactccaggtaccccacattcggtcgaaagacggaagcgcggcgagacgtcgatctcctgctgagaagctagataaaggcttgtatcggtcattcccacgttagagttcgtccttcaagcgctaggctgctgcgggctcatgtctactgctgtctgatttctcatgacctgctccccgatttcagtaccacgccgaacttagtagagtccgttttccgagcaggagacggcagtgaaaaagcgttttaccgaagagcagattctcgacttcctcaagcaggcggaggccggtgtgccggtgaaggaactgtgtcgccgacacggcttcagtgatgcctcgttctacacctggcgggccaagtttggcggtatgaccgtggcggacgccaaacggttgaaggatcttgaactggaaaacagccgattgaagaagttgctcgccgaggcccacctcgacatcgagtcgctgaaagtggtcgcccggggaaaagggtaagcccgacagcacggcgggaggcggtgcaggagatgcaggcgcgaaccggcatctccgagcgtcgtgcctgtcagttgatcgggctgtcccgctcggtgttgcgctaccagccgcgagccagtgtgcaaaacaccgagctgcaagcccaactggtggaactggcccaagagcgccggcgctttggctatcgccgcctgcacatcctgctgcggcgtgctggcgtgcaggtcaaccacaagcggatctatcgcctgtaccgcgctgccggcttgatggtgaaacggcggcgccgccgccatggcgtcgcggtggagcgcgaacgtctgagtttgccgagcgcaccaaaccaggtctggtcgatggacttcgtcttcgatgcactgagcaccgggcggcggatcaaatgcctgacggtggtcgatgacttcaccaaggagtcggtcggcatcctggtggagcacggtatcagcggctttcgtgtcacacgggcgctggacgagatggcgcggtttcgcggctacccgaaagcgatccgcaccgaccaggggcccgagttcaccggcaaggcactcgatcaatgggcctatcagcgcgacatcaagctgaagctgattcagcctggtaagcccacgcagaatgccttcatcgagtcgttcaacggtaagttccgggacgaatgcctcaatgagcactggttctgttcgctggccgaagcgagaatccgcatcgcggcctggcggcgggattacaacgaacaccgaccgcacagcgcgattggcaatctcaccccggcagaatttgctgcaagttggcgaactcgccagcagcagctgaagcaggaaaaattaatatcaaccccagggcctactaactaggcagcggtactaaaactgggggcaggtcactcaaatccacgatccggcagatccttgcaccgctccaacttgaacagtccctgaagggcagacatgactccgggctcggaagccccaaccatgctcttgatttgcaggaaattgctccaagcgtatgtccatccagaatcaatgtttggtcggcagatttgcttggcaatttcagcaagagcggcttcgggggcaacctcaagaaccggcgatgtctccttcatcagctcatctgactccaccgctgttaggatcttgtatggctccacgtaaccaatagcaaggtctgccgcctcggtttcaaagagcgaggtggctgtcaggtcggttcctgccatcacaactcgattgaatttcacgccgtagagtgacgccaaggataggtcggcctgcagaaagtctgagtcattgactactacgttgtcccaatagctgcccttgagcctggcatgcctgaaggtcgtgttacttatcgtcgtgtgcatgaaagtggaaccgtccaacgcggcaaggtcaaagctagctccgttgagcttggtccccacgaacaccgacccgtacaatcgcgtgaatgacagattagcgccggacaggtctgcatcatgcgcccagacccgaggaatgacttgttggctgatatccagaaatcggaggttccttgaacgtaggtccaatgccactccgcgtgtcatgaacagctccttggcgtccacttttcctgagtgctcggcgaggtcggcatcggtagttgccacaccagaccagagccgatctgcacgatcaatatggatgtggggtatccacgctatcgttccctcgtcctcattatccaacaaggcggtatgagtcttgagccatacggttgctgagtactgagccggaatcagtatcacatcggcgcagaggagcagccatgagcccactaccgtgccggcaaggtagcaagcccacttaaccggtgtctgtgccgtccggaccttttcaggcagtacttcatgaaaacgcactaacgtcgcatagcaggcgtagaccagcgcggccgcctggatgagaaacacgactggactttgataagccgcgaatctgcaggtgatcagtaacagtgtggctggtcccgcgaagagcaggcagatcaccatgaggtaatcagtgctgacgttcaactgctcatgcctagcatggggctcggtgttgaggagttttgggaatgtcatcgggatccgccgcagcgtcaccaggtgacctatcagaactatcagcggactgagcaagtaaaagcccacgaccggcactgtcacgcttacgagtggcagctgaatgcctctgctcggtatcagcaacatctcatccttcgtcgacgagacgctggccaagacatataggatcagcagggcgtatgagaggtatgaggaaaggtcgacgtgctcgacaactgcgctcgttgttgctgagggttttccgaaggaagacgttttggttctgaggggacgtcgaggtctcatgagcagcttacggtaatggcaatcgggcgagggtagcccatggccaccagaggccgcaaacgacgggaaagcatcaggtcctcggcagatagttcgccctagtttcaggtacactagcggtacagtacggatattcccgactgtgacgtattgagacctaatgagttgattttaaagtgattttgcgtaacgtaccgtgactcattggagcattactggtacctggtgaaataacgacactggcga

SEQ ID NO: 5 - DNA, 7357 bp, Pseudomonas aeruginosa
aaacagaaaacaccaacaaaaaatttcaaaccagccataacaaaaaaacacaacaacactcgctgcaaaaacttcaaaacccgctctatcaaccaactaaagcaactatgcttttagaaaaaccaatatccaagtagttacccacctatttttctcaatactgaaaaagctttatgcctgtttttttgattggcgctccgcccctcaaccacccccttcaagcgtgctagtagtagatcactggcttctgctcctccttgctctatccaagaaagtgccaaaccaatccagtagtcagactcactagctagtcccgccaaaacaacatttaagtaacaaaatccccccccaagcttttccctaacctcttcgtaaggtttctccaataaaaccagaaccctccaaaaactctcttcctcctggagaaaaaaaacctgatcccccacggacaaataccacaacccttctgaattacaccgtagcgccatatcacctttaatataatattcaaaatcagccatcacatccctctccggtgctcaaccttcacaccatatttattcatcacatcaacaaacactttgcgattttcttccgaccaattcctccagtagtgcccactatattcattggtaaagaattcaccatttgggccacgccaaaattttccaccgacaactgtagcatcagcagccccaattgaatcagccaattgctgatgctgactcaacattggacgaaaatctttaggtcttcccaccgcaaagcttttacttatcggatcaaacacatactctatagaaccactatcagtgctcggataataattcctcaacgatttagaggatagtgaacctggctctacccctaaaaccccaggagtcggcccagaacctttccaagcaggactagaaactcctatccctcctcttaaggctggagcaaatctgaggcgactcgcaaaacctgcaacccatccagatactttatctcctgcagttgggaaaaatagactgccaagctcatacactccagctcctgccctctgatctacacctttaggggaaagtaaattatcaaaactttcacttacccgcgaaaacccataaatagaaaatggatttccagcaagggtagtcgccgcaaagttaagattctgcttgaacgcccccacccctaagtcccagtaactatctggaagattacctttaaaggcattccccaaaaccagccaactattacttataaacggtgagtaccaactattgccagacgaaatttcctccaacgcataccccgtcggatccacactggcgatcggattattccagccataggagtaacggttgtaggcctgcgcattggccgtatcctgatagacgatatcggcgctgaggaaccgcccgatcaccgggtcatagacccgcccgttcatatggacgagcccggactcctccaggtgctcgtggccggtgaagccacgccgggtggaggtggcggtgggttggttgccgttgtccttccagtcagcgccacggtgttcgccgaacgcggcgaaagactggcgttcgctgacggcaccgttggcgtcgagcaggatttccaccgagccgagcgcatcgcgcagcaggtagagctttttgacggcgcccccttccttgcgcaggatcaggtagtcgccgacgtaggcgtcctgccaactgcgcccgccgtcgttgacctcctcgaaacgcccctcgtccaggtagacggaggtgcgcccatccaccgtctgcaggtagcgcttgcgctcgggatcgtaggagaagcggctgaggctggaacctgcggaaatttccacgggtttatcgaacgatgcgtacttgacttgtcgccccggcccgctgagctggttgccgcgagcgtcatagcaatacgtcccggcgctggtgccgcgcacggcgtgcggtccgggctgggccaccccgccgcgaccagcacagagctgctgctcggcgctcgaatagctgccgtagcgataggcgccgacaccgctcttgccggtcaggttgcccagggcgtcgtaggtaaagtcctggaccacctgtgtgccatccagggtccgcgcgctgcgcaacagtcgattgaggtcatcgtagctcagcacttcgctgtagccgcgggcgtcgctgcgctccagcaggttgccgaggccatcgtagcggtagctcaggctctgcaggacactgccgcccttgctcgcctggatgcgcgtcaaccagccggtggcgggctggtagtcgcgctggcttagcacaccgttgccgtagctttcgcgaacgatctggtcgcgggcgtcgcgagcctggatctgccgcagcgtcgtcccggcgccgtcctgctccccagcggcgaagccgtatccattgtagagatggcgcagcacctggccgttgcccagggtggtgctcgccaggcggctgaagccgtcgtagccatacgactcctggtagctgcgggtgacaccgtcgacttcgatatcccagcctctcgccttcaaccgcgcgagatcgtcgtagagcagcgcctggcgatagcccggcccggccacgccgaccagcttgcccaggcttttcgttcccgtgtcgtactgccagcgcgaaatgctggcctggccgcccaggcggtcggtctgctcgagcacccggccgagcaggtcgtacttgcgctcggtgcgactgccgtcgctggcggtacgcaccagggcctggcccagggcatcgtactgcacgctttcctggccgctgttcgggtcgaaaaggccggtgcgacggcccgccgcgtcgtagctcatgcggatctcgctgcggctgtcgccagcgacctgggtccaggccaggttgccgtcggcgtcgtagcggtagcgaacggacacctcgccggcgctgcccagggcattggtactgagcaccagcttgccacgcgcatcgtattcgcggcgctcggtcaggctccttccgtcgtagccgaggctatattgcttccaactgccaccagcagcgcgcgcgccgtagctgtagctcagttgcgccccactgggcaactgccgggccaacggccggtcctgggcgtcccaggtggtctgtaggacggtcgccgcctcgatgtaaggctcggtagtcgaacgctgccggcccagcgcgtcgtaactgttgtcgacattgatccaacgaccgtcgaaggcctggcgacggtcgcgcaggacccgaccgaagccatccaggtactgccagcgttccaccgcgccctgctggctgcccctgacggtacgcgtgcgcacggctaccttggcgccgctggcacagatcgcccggctgccgcaaaccagatagtcggtggcgagcaggctaccgtcggcgaagcggcgcagggtttcccggccgaaagcgtcgtagagataactctcggccaggccgttggcgtcgaccttgctggtcggttggccgcgggccgcctcgtaggcgaagcgctcgacatggccgagggcattggaccgagtgcccggccagggcccctggtaggcgccgaactgttcgctgcgcgccgccagtccggcgccgctggtggtaatccggacgatccggccgttgccatcgtagctgtattgacgggtgatctccgcaccgggcgagccactgaaagatgtttcgctggccggcgctagagtccccggctgcgcgctgcgcaattgcacccgcgacttgctgtcgctgtcgccactggtactttcggtttcgcgggtgacgaaaccaaccagccaggaggcgccgtcgttgctgtactggcgctccaccacccggctgtgcaaggttccgccggtcaggctggcggcaatttcctcggtcacctgggtgggattgccgtaactctcgtccatcaccaccttgcgccgcgtggcgctgaccggcgcgccctggtcgaagcgttcctcgttgaactgggccgggtagacgaagaaagacttgccggcgatggtcgcggcagacttccactggttctgctgacgcgccaggagttttccggcgaggctggtttcctctttgtccaggcgcccgacgaaggggaagtcctggcgcaacatcctcacctgggtgcgcccgcgtgccagatcgcgaacctccatctggcggaaaccgaggaagccgcggccgagcaggtccagccgcgccccctgatagagatactggtagtcgcgcgtgccgccgataccgtcggcgacccgcaggcggctgaccaccggtctgggaatattcagcgaaacctgggggaaggcgctgacctgcggcgtatgcacggcgggatcgttgagccgggcgtattcgatgccgaggctgttgccgctgccggcgtcgatccgactgagcagttccggcgagcgtcggttgtgcaggaacgcccgccaacggatgctgcgcctgagcggctcgacgaccaggctgccgccgaccagcacatcctggaaaccgtcgccgttgacgtccgcgacgaacatctcgtaggggtctaccagcaggccttccgggctgaagccgcagttggcggcggtctggtagtacagccaactcgccgactcgcgcccggcggcatccggcgcggtgtccatgatccgcttccagaccgccagggcatcctggcaactcttgtccagttgtgtcgtcgaggttgccaaacggcggctcagcggaaccccggagtccagttcctcgaagccgttgccggtaaagcggagcagaccgaaagtgccggaagcgcggggatagaggatttcctcgcggccgtctccatcgtagtcgacggccttggccgcgtagtcctggagcgaggcgcgaaacctgtactctggcagcaactgggcagccgacaacgaagtccccaggcgctggaacaaacccgccgacagggggccgccggtattcagcaacagatcgaccttgccggaggcgttgggtaccaggtagtccatctgcccatcgccattgacatcggcggtcagcgcccgcgccagctcgatgccaaggtcgaccatcgccgccggcgccatgccgctgccactgcgccagatacctgcagacagcttgccggccttgccgctggccaggcgcacgccgccgccgggatcactgccccagtaggagaaccagccatagtcgatggtcttgaagccgctgagcagggcactacgagcgaaggaggggatggctccggaacgattgaggtaagccacccaactgccattgatgggcaggaacaggtcaagcgagccgttctggtccagatcagccaccagcggcgcgtaggtggcgaagccggtggaaccgccggccagggaatagacgatgccgttggggccggccggcggggcggtccaggtatcgcccagggcaaccacgccattggccgtatacagcatccactgcatgtcggcgttcgcggaattcggatccttcctcatgcgcaggaagaggatctcgtccttgccgtcgccgttgaaatccatccgcgtcagggaaaacaacggcgtattatcggcgtcgtacaatagccgctcgaccaggctgccgccgtcgtagctcaccgccttcagcttgcccatggtggcgttgaccagggcgtggcggccgtcgccattcagatcggcggtgacgaagctggcctggctgatcagcacatagtcgaacttgtccaagccagcggattcagccgtcccggtataaccatagacgcccgccaggtagtcgaaggcaaccggactcagacactccttgccggcgctcccccaggcgcaccgttgcacctgcttcaaacgcaccttgctggcgtccccctgggtgcgctcgtaggcaagctcggtacgaaacaactgctgcgcggcaggccctcgcacggcgaccgcggtcaacacatgggtggcgctggtatagccaccggcgaaatagcgcggcacgctgcgcaaggcgcctgcgtactcgaaggaaacccggttaccggcatagagtatttcgctggggaccagactgttggcggccaggtagcggtactcgatggtattaccgaagcggtccgtcgccgaactgatgccccattgatagggaaccgccgctccttgcgccttaatcgcagccgcgccgtcataggtcaggatccgaccgtcccgagtgcgtacttcgaaaccgagcgaggcggcgctgccggtggcctggactcgggagaagctgtcgatctcggtacgatagacgctgcccggcttgaagtactcgccggacagcaactgcaggcgcatgccatccaggcataggcgatccgactccaacaggccgacctggcggttctgcccatcctgggcgatgctcgccggacaacgctcgatcgacgacagcccagccaggctccaaccttcgcccagcacgccgcccccaccgccctggaccagcgccagctcgggttgcagcccagcaatgcctggcggcagctcaaggggatagcggtagtccaccccaccgtcgcctctcacacctgcctggggagccagcaggttcaaggctgtgaaggcttccgctgccttgcccagtaccacgccgggaagcggagtgggtacgctcaggtagcgagccaccagttgtccaccggcatcgatgaacaacgtgctctgcccctgggtcggatggctgactcgaatgctggtaccgccgttgcccagccaatcgccaagggcgaaacgagcgccggcgtcatagccgatctcggtgcccagcccggtaccgctggctacctgcagtacgccgtgcgcggaagggttgccgctgacgatcagcagcgagtcgctggaatcgttcggctgcaggatcaggtcgaggatgccatcgcgattcaggtcgccgatgaagctctggtagggcgccgccgtccaggccacggcgttcagatccgccgccggtggatcgtagagggcgctgtagctggcaccattgcgcagcaggacgacattcttcaacggtggcaggagcggaatcggcgtagccacttcgcctcccaccacgaccaccgaagtgaccgccttcaggtagaggtccggctgaccgtcgccattgtagtcgccgctatagacacggaagtttgccgaacgccagccagcggcggtcgcgtccccgaccatgagacagatcgccacggcgacgatccacgcactccaacgccccaccatgcatcccccagagcccacccccatggcaggcacgcagaccgggcgcaaagcaccgctcccaggcaggcggtgcggtacgcgtccttgcaactcgggagacgtgtaccacaaggccat

SEQ ID NO: 6 - DNA, 3427 bp, Pseudomonas aeruginosa
atgcgcatccccccatacttcccccgtctcggcgccctcgccctggcctgcgccctcgccctgcccgcacaggcggccgagcgcgcctggagctacagctacaacgccctcggcctgatcgagcgcgccgacggtccgcgcaccgatgtgcaggacgtcaccctctatgcctacgacagtcgcggcaacctgacccaggtgaccaacgccctcggccaggtcacccgcctcggcgactatgacgagcgcggcaagcccggcagcatcaccgatgccaacggcgtcaccagcagcctcgcctacaccggcgtcgacggctggctggcctccgtcagcaccgccggcagcaccacccgcttcgactatgacgcggtcggccagatcacccgcgtcacccgtggcgacggcagttggctgagctacgaatacgacgacgcacgacgcctggtggcgatcggcaacaacctcggcgaacgcctcgaatacgacgtcgacaccaagggcaatcgcaccgcccagcgcatcaaggacgccagcggcagcctggtgcgccagcagcaatgggcctacgacgagcttggccggctgctccgcgcggtcggcgccggcggccagacacgcagcttcgcctacgacctcaacgacaatccggtcggcgaaaccaacccgcgccagttcgcccacagccaggccttcgacgccctcgaccggctggtcggccagagcgatcccctcggcggcaagacccgactcgcctacgacgcccaggacaacctcaccgaggtcaaggacccgcgcggcgtcaccacccgctacgaatacgacggcctcggcaacctgacccgactggtcagcccggacagcggcaccaccaccttcgagcacgacgccgccggcaacgtcatccgccgcaccgacgctcgcggtgcggtcaccgagtatcgctacgacgccctcaatcgcctggtcgagcgccgctcgccgagcgacccgagcctcgacgtacagtaccgctacgatctcaccgccgacggcaaccagggcatcggccgcctgggcgccatcgaaggtgcccgcgacagcctggtgtaccgctacgacgagcgcggcaacctggtcgagcaggtacgcagcatccgcctcgaccagcagaccctgctcgaccgcgtgacctaccgctacgacgcggccaaccaactgctggagatcggctacccctccggcctcgccatcggctacccgcgcaacgccggcggccaggtcgccagcgtgaccctggcagtaggcgacaaggcgccgagcaccctggtcgggcagatcgcctacctgcccttcggcccgctgctgcgcctgacctggggcaacggcatcactctcagccgcgagtacgaccaggactaccaactgctgcggcagaaggtcggcccctggcagagcgactaccagcacgatgccaatggcaatatccagcagcaccgccacagcctctggggcaccctggactaccagtacgacccgctggaccgcctgaccgaggaacgcggcgtccagggcgggcgcagctatgcttacgacgcggtcggcaaccgcacccaacgcagcgacaaccccgcctcaggcggcaccgccagcagccaggactaccagtacgcgcccgacagcaaccgattgaccgccatcggcgcgcaagcggtgaccagcaacgccgccggcaacctcacccaggaccgcgccgcgcgcaaactggcctacgacgcccagggccgcctgcaaagcgtcagcctcgacggccagcaggtcgccgaataccgctacaacgccctcggccagcgcatcgtcaagctcacccccgagagcgtcaccacctacctctacggtcccgacggccagttgctcggcgaagccgaacacgacggcagcggccggaaactgcgagcccagtactacctgtggctggacagcctgccgctggccaccatcgacgccgactacgacgcccagggcaaggtcggcaacccgaccctgctctacctccatggcgaccacctcgacaccccgcgcctggccaccgacgccagcggccagatcgcctggcagtggcagtccgacgccttcggccgcggcgaagcgctgagccagggcagcacccaggtcaacctgcgcttccccgggcagtactacgatgcggagagcgggctgcactacaactacttccgcgactatgatccggagactgggcggtatgtggagagtgatccgattgggttggagggaggaatcaacacttatggttatgtgaatgcaaatccgatcaatcaaacagattggcgaggaacagtccccgatcaaatctgtttagctgcatgcattaccgtaggtacagtaacgggtggttatgtaggtactgtggtcggtggattagcaggggggcaggaggtacgctggtattgcctataggtgggacgatttccggcggtgttgctggtgcatccgcaggtggtgcaattggagctattggcggtggtttggcagggaatgctgcaggaaacgctttttgcccagaagacgaatgtgatccaccggcaggcacacagtgttatgagtacaatactggccacaaacacaaagggatggatccccattaccatatatggcaaatgaacaaatcccctaatgggtgcttctggaataaaaaaagaggactggcagacactcaccccgtacaacccagcggactatcgtcctgctcatcgtactcaagttggactagtcaaaacggaggttaagctatggagttcaaatgcatcgggttcgatatcaggctccccgaaagtcttgataatatttcagccgacgccacagcctggccgcaagacactcaactttatgagagggcacttaacagtctaaaacttcaagaaaacgagttacagctaatccagatagatacgcaagaacaactagcggagcttcaaggccttatcaaggcagaagggaatggctctgttctactatcaatggaagtatacagcgaagtaattgacgcactaaagctctctcgatttcgtgatttcaactcaactcaggccagcatagccagctggaccgaactgggtctggatgtatgcgatataaacggatacttctctatacttaaaatggagacttcaatctctcaagaaatattaataccgccaaaagagattgagaaagctcacgcaatttgcgaagcagccaacatcctcatcaaagaacacgcccccttcgttactataaagttgcgacactattcaggctctgcatgactcaaaaaaaataacgcagccctaattgcagctaatctatatcagacgactctcttaagtagccgcgacaaatagaaaaattaactacgaggaaagagggggcagatttatttttaccacta

SEQ ID NO: 7 - DNA, 2003 bp, Pseudomonas aeruginosa
aagcagtcagtgcctaccatttggttaaaggacggccgcgagcgtagcttgcgaacgtccaagtgagcagagcaaactacttgagcctgttgttatcagtaggaatgcacagtttcaactgtggaatcaatttcacccgctaaatcgtttgcgtgatttagcaagtcagcgatggattcaactgaaatttctactttttcaccatccttattgtaaccggcacgatgtacacagtggtgccgaatctccacggatttaaacaaccaagagagatctgaaaatttgtgatttaaaaccgcttcgtacattggctttattctttttaggtcatggaatatcagatcttttaggtagctggcgacggttgcttttaaattttcttcttcttgatatatttcacgcaaggtaaatttacgcttggagaactccggatcactttcaacaagttttctagtaagctcttcagaattacaagcctgatggataaatacaccagctaaatatccttaaatggtagaaaccacatgagcgtgaatcataactaaaaagctaacgccacaagcggcgaaatatttccgccacttgcgtctgaaacgatatttttccatgaaaaatccttcagcggcatgcgtggctcggtggaaacgcaacatgaagcaggaagagaaagcgacatggcttgagcagagattacaaagtcgttagcagcgtgtccatgggctgtttgggtcgagcggctgtgctcgtgacgaggaattagtcagttttctcaggaccagcttctggccgattgcagccctaggcggatgtccgcaatgggtcgaaagcagccagtcgcggctgacagctttcgccccacaccagacaccaccaaagattttatctgtgaaaagcgggctgtaatttttgccagtacgtaaacgcggactgttgtatttaggaaatttatcagcccagtaaatcaagtcaaaattttactaacaagaaattagcgccttgttttttagtagccatggagacttccaaaaaatgatggaagctggcgatgatttgcgtacagttaaatgttaggacgcttctcgcgcctacgatttctcctcattgttcttatttccattaagtctttttagcacttcatccatccctggccacgggacgtcattttttttgttcccaggttttttataccagctatcaaaaccatccttctccttctttgtcatggtctgataaattttcagcatctctggagatagagaaactgattgaatggccatttttgttctgaccgcatcaatgaattcgcggaacatttccgctgtaatcgtgagggcgccaggcgccaacttccaagcaagcacctcaaactgatatccagtctcgggtattgtggacttattatggagaatacagtgcctgattttacgtagatcccccatcaacggaacagtcagagtgctagcttcaaccccagctgctttggctattttatgcctatacgtttcgtcccacagcgaataaatggtacataataacgatttgcaaacttcgctaacaaagaaaccattcttctttgatttttcgataaacatcgaaatatccattcttgcatgatattttggggcggattccgtatcagatgctatccaaattttttgacccggcttcgccttttccttagctatgaggtcaccattaatttctattcccttagaggcaaacatcaagcagaataaatactccccgcaagcctcatgaaactcttccactaaatccttagctgtatcgcttttcgaattactttccatttctgatctcgattatttacaattactttctttatctacatgaccgagattccttcatctggtcaagggtacttcatattaattggtaggcgcttctgcgaatggcagttactggccgttttctgccagtccaaattggtgaaatcaataccaatgagagcctccatacgcagctaccttccaccacccaacccc

SEQ ID NO: 8 - protein, 426 aa, Pseudomonas aeruginosa
MTPQQLTEEYIFAHDLREASAKIYRAATKALLKHFGPTATVHDVDHRAVLGWRRKVLEQGLSKRSWNTYSNHLRTIWGYAIEHELVTHSQVNPFRKTTVIPPRRASKTVAAEAILRARSWLNMQVGAERCTGDRARITPAWFWLCTFEVFYYTGIRLNALLCIRKRDIDWDNQLILIRGETEKTHKEFVVPITEGLVPHLSRLLQEADRAGFADDDQLFNVNRFSPHYKSKVMNSDQVEAMYRKLTEKVAVRMTPHRFRHTLATDLMKAPERNIHLTKCLLNHSNIQTTMSYIEADYDHMRAVLHARSLAQGALENVRKVDYSGSPQASAKPKPCGQPLARMGEAPPQEARTEPAEPREHTPGTGIQGDATAWEEALPQPPDTFEQRVLFTLMAQHLSNRAATASAASTATSGSGGWGSTARSSPA

SEQ ID NO: 9 - protein, 639 aa, Pseudomonas aeruginosa
MFQLLSWISRKPSPTPPTKAAPGGFLPPLSSMELLGTPRRRQLLENIWQRASLSKQQFEEIYRRPLANYAELVQQLPASENHHHAHPGGMIDHGLEIVAYALKVRQTYLLPVGAAPESQSAQAEAWSAAAAYGALAHDIGKIVVDLQVELQDGSTWHPWNGPINQPYRFKYVKSREYQLHGAASALLIHQLLPRTALDWLSRFPELWAQLIYLFAGQYEHAGILGEIIVKADQASVAQELGGNPDRALAAPKQSLQRQLADGLRFLVKDKFKLNQPGGPSDGWLTQDALWLVSKPAADQLRAYLLAQGIEGVPSSNAPFFNMLQDQAVIQTNAEDKAIWTATIDNGAGWRNKFTLLKIAPALIWADPAERPDSYSGSLVIEEGNASPEKPETTCEIPNDPIEQRQAPEAKMTLRQPTPSVAKPSNEMRAIAKPSAEDQEETDDLYALLGNINSPPEELDTSHDSPAASSTNTRGEENLQQPLGTKEPTDCAPEAVEDVFMPSRSTDLGQGFVGWMKSGIAARRLFINDTKALVHTVDGTAMLVTPGIFKRYVQEHPELEKLAQAKETTGWKLVQRAFEKQGLHRKTSKSLNIWTIKVSGPRKTKELKAYLLQDPKLLFPEQPLDNPSLTVITDAEGGVE

SEQ ID NO: 10 - protein, 420 aa, Pseudomonas aeruginosa
MQIAFDQWTKGRKINTLGTNAGAEKLPFQTWRHFKEAFAPELVARAVRESLLPVRTCIDPFGGSGTTALACQFLGVEPVTMEVNPYLADLIEAKLTAYDSTSLTHDLGQIIRAVRSIRGDHDLSWLPTTFVAPGVNNRWLFEHDVAQRIESYRKAIASLSNPIHQMFFRAILGGFLVEVSNVLISGKGRRYRQNWQLRKQSPETVDQQFLNRVQKALYEIARYASRPVSKYTLIRGDCRETIANAPMADLAVFSPPYPNSFDYTDVYNVELWVLGYLNDSADNRSLRQSTLASHVQIQRNYAPRPLGSATLDDVSKKLHASRELLWSRWIPNMVDGYFADMAGVMKSLANRLPLQGEAWAVVGDSLYANIHIPVAEILTELAPTCGFEAVHVEAFRSMRSSAQQGGKQELAESLVVFRKV

SEQ ID NO: 11 - protein, 677 aa, Pseudomonas aeruginosa
MRSSISLPVIERLVIRNFSLYPGEHGNGLDIAFENGISVIAGINGIGKTTLLTLLLRLLLGPSNPEKATKNVGRVSQRRLVEPKKFDFFSSRVPEKLDDDAYATLYFSVGQRKVEVSRYMRDMRIKGVKVSGRKYTPAGETAFIEELASMSGLLSAYDFHMVVRYLQFFGEDRLPLLWEPSAQFEFFKILFFDESVAETLNKLFALIQKIDSEYRNRTNILNRRKDTLPSLERPALSIEVQTSQGQLKEAKAAAAEAEVEYINLKQEFDMLQREENQLLLQTDDGQIKLAELEAQFLQADSKFILQALPSLGDKERFLMQGYATGCGCFICGAKSKKQLSGISKKIRKGHCFVCDSQTPASNPPSITPINVNDIHRIEADLDSIRRHLAANDAKLAEIEEHKARIAPLLRSAATKRALTLQAVETLDMLRPVDEGQEMYDVYSEIDREQAELDVLAENRKRYTSEYRAAVDNAQEEMSTLKADLETRLTNYAMEFLQERVSVAFNRQTPFKIATGADRVNIPAFTVKMTSGTHKLPSERSSSSSVSESQKEFLDLAFRMTLLDMINTNGQKMLVIETPEASLDSWFMRRAADLMRSFAPEDSTAPRKVIATSNLNGTEMIPALLGLIDAKGKISKLQSHRSNHFINLLELTPSPAALSEGRAVQLLHEELGRFLNAK

SEQ ID NO: 12 - protein, 103 aa, Pseudomonas aeruginosa
MTEYRLYFSKSLDGRRVFAPILFDQKHFTWPSQGGYIRQVLNQHPIQRLSFLLLRDTFRLERLYRAKTDIKQETINSPTHISLTKNLADLQAILFKLEHPVKL

SEQ ID NO: 13 - protein, 351 aa, Pseudomonas aeruginosa
MTIEPTFTYSEKSHIERLRPGNSGSSEDQFIQEVIDFYRYWQSKRSLGDYGSTEQALLMIFAETPDVDLGLKDYVPTTISRIRRRSGTVSQGIAVCNQNFRLMVRLLDALTVDEAYDFIEHHLGDQHTFVIAKFGQQTIQIHRAGQPLDDWIHEPDEILIKSTDENITPDSLAEDLRVFHHEWLSTPRAIGARTMWELNKTKTQYDLRSGPERSVQSYLLTYLRASYRRSGVFVNEEINNQGGRTDLYVQRETSPGSNKQINTVIELKVLSPKKSFERNLEWAKEGITQAKGYANANTDAAFACLYDARRNKLAMPELPAFALANSVRLEHYEMEVPLPPPKKKPAKMAKA

SEQ ID NO: 14 - protein, 116 aa, Pseudomonas aeruginosa
MAKYRISHDAQADIVDILRFTHNRFGDAARRRYQALIGAALEAVATDPQQVGSISREELGAGLRSIHLVYCRSMPNVGKVVRPRHFVFYRVATDQVLEVVRVLHDSMDLDQHLPQR

SEQ ID NO: 15 - protein, 90 aa, Pseudomonas aeruginosa
MATRNVVLPDPLEQDINELVETGRYQNRSEVIRAGLRLLLQQEAQNSAKLEALRNATSSGLMQLERGEYDEITSDDLAQYLDELGNQASH

SEQ ID NO: 16 - protein, 87 aa, Pseudomonas aeruginosa
MKKRFTEEQILDFLKQAEAGVPVKELCRRHGFSDASFYTWRAKFGGMTVADAKRLKDLELENSRLKKLLAEAHLDIESLKVVARGKG

SEQ ID NO: 17 - protein, 217 aa, Pseudomonas aeruginosa
MQVNHKRIYRLYRAAGLMVKRRRRRHGVAVERERLSLPSAPNQVWSMDFVFDALSTGRRIKCLTVVDDFTKESVGILVEHGISGFRVTRALDEMARFRGYPKAIRTDQGPEFTGKALDQWAYQRDIKLKLIQPGKPTQNAFIESFNGKFRDECLNEHWFCSLAEARIRIAAWRRDYNEHRPHSAIGNLTPAEFAASWRTRQQQLKQEKLISTPGPTN

SEQ ID NO: 18 - protein, 117 aa, Pseudomonas aeruginosa
MEAHAYKGFASRIGFGLGTFVCFCLHDRRPVVRWIKRACLVVVLFVILVQNFTWLASAFMTLLSFGLIGWVLVKGDFSIFQQLEKDEAQAAPYGRDVFGNELDWMGRRDDGVLSRED

SEQ ID NO: 19 - protein, 511 aa, Pseudomonas aeruginosa
MTFMTNDYLEYYLTLLGWIINNGIWNMISDTGLFAVPFVAIVMREWLKVRGEGADEGNKGVLSLARIETHIYVGYIVVALAGIPVVNVSFDTIEFDQARAQQCQYNLPAPADTGWSTSFSSLAGKSAQMPLWWAMMHALSKGFTAGAVAAIPCGTDLRQMRMEVDNTRVNNPLLAQEIADFSRDCYGPSRARLFMRQPDLGSVGEDNKALQDLNWIGSRFLLNTPGYYDTDYSKSPRQSWPYNATRDAGLPQVGGGGGYPTCKQWWADSGIGLRDRIKGQVDPDLMTSFLKWAKWLDQDEVTEAVIRQVISPSSQVKGNVYTDYGGQVGGTVWNGIARTAGTFGVALGSLAYFPAMDMVRQALPMVMSFLKMAMVICIPMVLVIGTYQLKVAMTMTVVFFAMMFVDFWFQLARYIDSTILDAFYGSGSPHLSFDPVMGLNTATQDAILNFVMGAMFVILPMLWITAIGWAGVQVGALLSDLSNGVKGVQQAGVQGGSVAKQAISSFSPKGD

SEQ ID NO: 20 - protein, 115 aa, Pseudomonas aeruginosa
MADTLTSRKLLGQLLVGVMIVVGLAVVGTLLSLFALNHFGGIQGLEAWRQSNYWSLFAWRALLYCALAIAWFRLKQRKELSAHERQRIRRIEILVLLLILLIEFSKAYFRTGGAA

SEQ ID NO: 21 - protein, 460 aa, Pseudomonas aeruginosa
MNITSVALTWLLAAQLAQADDPINVSKTGTVLSDEVLYSIGGGSAVSMGSAGQMDSIGVGFGWNNDLMCGNMNLSTTLENQLNGATQGFQNIMGSVIQNATGAVMSLPALIIQRANPQLYNLITNGILQARIDYYRSKGTCRAIAEKMADIAGEQTGWGKIAEGQALGATLASGGKDAVSALEVVEKKGGNDGVTWVGGDKAGGSGQKPIRIVNDVTRAGYNLLTSRSVKDSSSVPSASCNNGLVCNTWSSPQEAAAFATRVLGEQQQQTCEGCQKTVTAAGVGLTPLIQETYDKKLQSLQELLSKSKPLTAENLAAAGTDALPITRGVIEALRDERDQDVLARRLASDVSLMDVLSKALLLQRLMFAGAKEPNVAANGLATQAVDQQTSLLQQEISNLKTELELRRELASNSPMRVIERGQQRASGSSGVFESAPDADRLDRLQAPSAAGGKSGSGGRP

SEQ ID NO: 22 - protein, 312 aa, Pseudomonas aeruginosa
MTSLNLRRLAAAAATFSLSFTAAAAINSAAIVSSTLSPQCLEYKVVGICYWLLCGPHGCKVKTSVKVRHYVPDAVVSSYANTGSNPWTEVSALGTPNPLAQAGNDATTNYKAENSIGRFKEADVIGHPGGATFSRFASASGYVCPGATFPLVPYFLSTLDAIGWRHGIPEQVYPEALVPGLREVGGIFSGDMWGNLYPRSGFLHQTDDYKTAAVIAQRAGDITTRIGQLHVYLPMRAAPKDGYWPAGELKEGDASTGKWQELTPSLSLNCAVFPNSGPKTQAVDGDYAWALWRPYSCCQRKGQIFLGSTDFQ

SEQ ID NO: 23 - protein, 143 aa, Pseudomonas aeruginosa
MPLHRSPPAWWPRPLAVGLLLVLLTGASQAETWVITDQAHPVTATGSSRVLLLDAQQHLEEQLTDALPKDPQQAQVAFQQLLQSPEGRRLQAELVKAQQDVTDAWSLGVEKIPAVVVDRQYVVYGEPDVPRALELIAKARRTR

SEQ ID NO: 24 - protein, 72 aa, Pseudomonas aeruginosa
MERLLESIYINARPAMEFKLSLTSSGRKKIVKIVDGDEVEMLPGDVQSILESQKMDVGILSDFFVQTLLERR

SEQ ID NO: 25 - protein, 219 aa, Pseudomonas aeruginosa
MRLLKGGWAAKRFQGPALPWAGLLLVLLAVSALGVELLVKGLPANHSLYGDAKARWTINEYADLECPFCKVYTPRLKRWVDSHPDVNLVWRHLPLQMHGEAARHQARLVECAGIQGGAKAFWSAIDAIFAQSAGNGGGLPGGTLHFPELDQARLEKCAKDMDLVDRLIKTDIDTARSNGITATPTLVIRDNQTGRSVKLEGMADETTLLSAIDWLARDH

SEQ ID NO: 26 - protein, 94 aa, Pseudomonas aeruginosa
MRALNSLTQNLIDNLTQILQNPEEDALQTLRICAPVLIEELQQIQLRAVDRRDIVPQIKQLLDEWLQQHPQPDTAQQALIEAVDRAEVLQRRQA

SEQ ID NO: 27 - protein, 934 aa, Pseudomonas aeruginosa
MGIPLPNTGSKNGATQAEASRLYDHDPSFVDLLPWAEYLPDEQVMLLEDGRSRAVFFELVPLGTEGRDPNWMQNARDALKEALQNSFDEHETSPWIVQFYAQDEISWDNFQEQLRQYVHPRARGSAFSEMYLALMKHHLEGISKPGGLFVDTAVSKLPWRGQQRRVRMVVYRRIRKADAQIRGQDPAAYLKSICERIQGGLANAGIVASRMGGQEIRNWLIRWFNPHPDHLGKTDADLRRFYELVCRPDEPILQDDLPLADGTDFSQNLFYRQPVSDATQGVWLFDAMPHRVIVVDQLNKAPLTGHFTGETLKGDGLNALFDRMPEDTLLCITMVVTPQDMLEGHLQQLSKKAVGDNQASIHTREDVATVRRLIGREHKLYRGSIALFVRGRDHTQLEERCITLSNVLLGAGLVPVEPQNEVGPLNSYLRWLPCNFDPNEKRALEWYTQMMFAQHIANLSPIWGRTTGTGHPGFTLFNRGGAPLTFDPFNKLDRQMNAHGFIFGPTGSGKSASLTNLISQMLAMYLPRMFVAEAGNSFGLLADFAKRFGLSVHRVRLAPGSGVSLAPFADAIKLVESPDQVKVLDAEDIEASDSVQGSKADLEDDQRDILGEMEIVARLMITGGEEKEDARLTRADRSAIRQAILAAARTCAAANRTVLTQDVRDALYEASRSDGSAPERRARLAEMAEAMQMFCMGADGEMFNRKGTPWPEADLTVVDFATYAREGYAAQLGIAYISLLNTVNNIAERDQFKGRPIVKITDEGHIITKHPLLLPYAMKITKMWRKLGAWFWLATQNIDDIPASGAPMLNMIEWWLCLNMPPDEVEKISRFRELSPAQKSMMLSARKESGKFTEGVLLAKGKEYLFRVVPPSLYLALAMTENEEKNQRYNIMQATGCDELEAALQVAADLDKARGLPPFPINFPDQPAVECQDE

SEQ ID NO: 28 - protein, 115 aa, Pseudomonas aeruginosa
MLPHGEANMLDVWEQGATSSIGNSRGRLLLDARQTLRRPINPQQVASANDQADYTRTASNEIHSQFKRLPNPDLVMYVFPHLAGSDPAPVPGYTTVFPFYQRVQYAMPGERTEDY

SEQ ID NO: 29 - protein, 501 aa, Pseudomonas aeruginosa
MALTGNPLLKLLVIPVVIGAILIGVSMMGKKESAQSQGAATPTVTSEEAATLGIDGDTPADTLRTIVAESRQLKDQISKVIKENDSLKAANENLQGRLRNIDQNIEQKLNNTAQELQQQQENRSQTILDQVQKRLENLTHVPEAGDTDLPVGFGVRPEDGQHFQGAGSSSSDIVWIEPQDARAVDANGQPLAAGSTTQPSGFSFPTSFGNAVDRGQNALERIDDGLHPVGQQRSDLENRKLVRKTYTLPQNSTLMGSVAMSALIGRVPVDGTVNDPYPFKILIGPDNLTANGIELPDVAGAVASGTASGDWTLSCVRGQIRSLTFAFNDGTVRTFPAPAEEVNDNQSNNNQTASADQKTIQGGLGWISDPYGIPCIAGDRRSNAKEYLGNQSLLTAAGAGIAKLLDADENNTSTVFSGNGTSFGTTGTNSNSALNSILSGGVSDIRQWMNKLYGEAFAAVYVQPGARVAVHLDQQLAIDYELKGRKVDYSSGAAHATADLD

SEQ ID NO: 30 - protein, 294 aa, Pseudomonas aeruginosa
MIRKSTGSLLLMLALPTLAHAVEILRWERIPLAIPLTVGQERIVFVDRNVRVGVPRDLQGKLRVQSTGGALYLLANEPIPPARLRLQDATNGEQMLIDIAATEAAADQQPREPVRIVAGEPVAPHYGQPREAQPSAAAKQTEQAEAPKAVPRETPIPVVLTRYAAQMLYAPLRTVEPVDGVGQVRVKRQLDLTTLLPSLPITATALGAWRLDDYYVTAVKLQNASAQHLALDPRDLMGNFVAATFQHPYLGARGDASDTTTVYLVTRGRGLADALLPSSISQIDPKGGRRGADR

SEQ ID NO: 31 - protein, 219 aa, Pseudomonas aeruginosa
MSFRKHTAQQQAHINTFRFITGFLCMVIVVLAYCVWEARKDLWIHIPPDLRSGSTRLWWDIPPESVYAFGLYIFQQVQRWPKDGEVDYKSNLFRYAAYLTPSCKVFLEKDFEFRRNAGELRGRERTTSEIPGRGIGESDGRVIQHSINDWTVNLDMDSTEYYAGEKIKRALARYPLHVIRADVDPETNPFGLQWDCYSDTPQRIELEEPAAPTKREGGL

SEQ ID NO: 32 - protein, 128 aa, Pseudomonas aeruginosa
MPEEHLFQDGTLSFLPTRLNRQPVVIGGLTADEMWITVLTSGAAGFVLGIPAALVAGNAACIPLGALLVGALGLGIGSRILRRMKRGRPDTWFYRQVELALSLRFPVFGNRRLVTRSGAWTSRRTESP

SEQ ID NO: 33 - protein, 118 aa, Pseudomonas aeruginosa
MLKFTLQKLSTLCLRLAAISLVLPGVALAALPKPEAPSRGEGSGIMQTIQNFGYDGAMLLALLICVAVFLGVSWHTYGTYHAIHDGKKKWSDLGAGVAVGIGLLILIIYLVTKATTIM

SEQ ID NO: 34 - protein, 79 aa, Pseudomonas aeruginosa
MSMSGAQTSAFQAAAGFPPSAGEGLFIGAAMTFLLLWSAWAMYSTWRGWATNNLDSATAGVSAIRIVVLLSITSFFLLS

SEQ ID NO: 35 - protein, 112 aa, Pseudomonas aeruginosa
MNTPHQSLRRSCLAVLACSALVAQGAFAASASEQANLEVMIRQLNALEDTAHRSAQGADEPGQRFYFDYSRLAADLQRIRQGLQDYMTPSRAQPRDPSDLSGDYTLRGGPMP

SEQ ID NO: 36 - protein, 99 aa, Pseudomonas aeruginosa
MKQTFEYHVENIDIPYKTLTKGVAMFKHKEDTLEPDDHALLNPLRWAEVVRLGQEGWELVSVQPLMRGVTEIGNQNAQGWAWGIALPVSYLLFFKRATS

SEQ ID NO: 37 - protein, 369 aa, Pseudomonas aeruginosa
MKLILDFDGRLLNPSNMLEALSKAGKNTTISISNAQALNIDTLLKATTTAENTKNLSTTFNGAELTANNLQEVINLAGSLTRVSTIAAQAININTLLSAISTAGNSKSFSAEFNGAQLSSDNLLRAVNAAGTNTSISVNTAQAANITALLQTIHAAGNTKTFSAEFNGAQLTSNNIQQALDAAGTRTSISVNTAQAVNISTLLALINSAKDTKKFSADFNGAQLTADNLQQAISAAASGTSISVNTAQAANISILLQAINIAGNTKKFSANFNGAQLTSNNIQQALRAAGSNTSISMNSAQSANQSTLLELLDIASSSKQFQANYNGGMSNPSNLQQIVSRAGASATVFISDAQGLPIANILTLISSAG

SEQ ID NO: 38 - protein, 493 aa, Pseudomonas aeruginosa
MQWTHEQSPIIQSKASKILVRAFAGTGKTTTLVGFAKANATLRILYLCYNSSVEKAAKGKFPRNVVCKTAHSLAHAVYGIQYAHKKTKNLRLTDIARGLDTQDWELVRDVLATLNNYMASADAELGRPHFPRFRDKAFLTSAQERFLKQGLDMARVVWRRMVDLQDTGMLMPHDGYLKLYQLSKPDLSQRFDCMFLDEGQDINPVIADIAHWQRIKMAIVGDPHQQLYRFRGAEDALNSDWMVGAEEHYLTQSWRFGPAIAHVANIILSYKGETRKLQGLGPQTLVKKSLPADLPHRTFIHRTVIGVIENALQRVRNNPAPKFYWVGGIDSYSLRDLEDLYAFSRGLRQNVQNKKLLRDYRDYTQYVEIAEISQDSEMARSIKIISTYPDLPARILELRSLTLDDELDATITLTTAHKAKGLEWDFVCLYDDFNADPLAPDTDPGKRDDELNLIYVAVTRAMKILAINSLVLSIMQRYVDDRKLKEQIASCEK

SEQ ID NO: 39 - protein, 248 aa, Pseudomonas aeruginosa
MAEVTQRAEQQQESQKTLLGTIISTPFQFLGVMFGSLIGAIIVEWVCLYFFWPDAGWKHAQAMFEYELSWLSQGLLHSVVVQEPGRTATWLAQLAYDWLFVKTGMVDWMTNMTIIAQAGPRSPLDLRYLTAQGVSTLQNYGLAALYTVLTFVVRLVILAMTIPLFLMAAFTGLVDGLVRRDLRKFGAGRESSYLYHKARGSIIPLAIVPWTLYLAIPISINPLLILLPCAALLGVAVCITASTFKKYL

SEQ ID NO: 40 - protein, 743 aa, Pseudomonas aeruginosa
MAGQYPLEALLRPAVELYTTTVCFTAAALCIVAPWTFALTPLFGIVAALGFAWLGIVRLKQAGVVLRYRRNIRRLPKYTMTSAEMPVSNEHLFIGKGFRWTQKHTQRLADTYLPQFASYVEPSPLYERARRLEKQLEFAPFPLKLVAKATAWDVAWNPARPLPPVGGLPRLHGIEPREQDVGLQLGERVGHTLVLGTTRVGKTRLAELFITQDIRRTHCRGRRQRVKMGRRTQTVHHGYRRQRAEEQPDYEVVIVFDPKGDADLLKRMYVECERAGRLDEFYVFHLGHPDLSARYNAVGRFGRISEVATRVAGQLSGEGNSAAFREFAWRFVNIIARALHALGIRPDYQQILRHVVNIDALFVEYAQKYISEHDPRAWDTIIQIEGKLNDKNIPFNMKGRPLRVVAIDQYLTQKRIADPVMEGLKSAVRYDKTYFDKIVASLLPLLEKLTTGRISELLSPNYADLNDPRPIFDWMQVIRKRAVVYVGLDALSDTEVAAAVGNSMFSDLVSVAGHIYKHGVDDGLPGSLAGGKVRINLHADEFNELIGDEFIPMVNKAGGAGVQVTAYTQTMSDIEAKIGSRAKAGQIIGNFNNLFMLRVRETATAELLTNQLPKVQIYTSTPASGANDAINNKKAAFTSSSHDQVQMTSVPMLEPAHIVGLPKGQAFALLEGGNLWKIRMPLPAVDPDEVMPKSLQELAAGMRKGQAANSEWWEAPGYSALQDGLPQDLVDDFRHLGAGEDAA

SEQ ID NO: 41 - protein, 89 aa, Pseudomonas aeruginosa
MTTHLITLVIKQPSDAQARQLMYQGLLDLISRYGGEVASKALEDESTLCELLEQMLPDDEVEQARKQVLELHAKGRRPGRLQPAASLKV

SEQ ID NO: 42 - protein, 166 aa, Pseudomonas aeruginosa
MKKILATLAFCTAFATQAWAAGLIVVEDLGGASALPYYQGLDPQPSAATPGPGDLGVRGSGAFPVRSVRLSPGQVQGRAINAPGLQPLFLVGDDTLSRTWLKERGDELRGLQAVGLAVNVASEARLTEIRAWGKGLQILPAPADDLVDRLGLRHYPALITSTAIQQ

SEQ ID NO: 43 - protein, 193 aa, Pseudomonas aeruginosa
MATSVVRALQLATLLALVNIAQAAVDPPPAYKQIALPKGVPAEVLYSVALTESKVLLRGEYVPWPWTLNVAGKSYYYATRTAACTALLAAINLYGAKSVDSGLGQVNIGWNGHRFSSPCESLDPYKNLDATSDILIEQRDALYASAPGRPVDWIQVAGRYHRPAGGAPAAKYRRTVSRHLSQVLGVNLLVTNP

SEQ ID NO: 44 - protein, 251 aa, Pseudomonas aeruginosa
MIRTVSLLSGLVLLLSYPAVGQEAAASRETSSQLSGSQLGTLKQQTSQSDLAQEWGLNQQDWTRYQTLMQGPRGVYSPGIDPLTALGIEARSAEERRRYADLQVQAERRRVEKELAYQRAYDEAFARAYPGEGVIRLTESSAANPSGAPNMSPALQSSGRLALFVQDNCTACIQRVRDLQQQNKEFDLYFVGSQNDAERVRHWAILAGIDPKKVRSKQITLNHDEGRWMALGVGGALPALVQEVNGRWQRL

SEQ ID NO: 45 - protein, 229 aa, Pseudomonas aeruginosa
MKRPSPASMILGLCLTAMAGLLGYQQYQLTQLRSSVDSAAEKTSLEAILARLNRVDERLDAVDGQHLVSNEDFRSGQQALSNRIDAAQAFAKQASDAVENLAQTTASAGDLLVLKATVETLDGSVRTLQEKQTKAPPLIVPAPKRPIPAKPKPKPKPMEPPPFSILGVEYRGGERFLSVAPPGSTQLSQIYLIRQGDAVAGTTWRLTDLDDRTAHFDVAGASRSVRIQP

SEQ ID NO: 46 - protein, 90 aa, Pseudomonas aeruginosa
MNTDLPQLEQTIIDIARQELAAVAAFYRKREAGIESAHFDEAWSEYLARYHALSTLLVLGQLPNSGMSEEGARTLREIEAEYVALRVSAN

SEQ ID NO: 47 - protein, 45 aa, Pseudomonas aeruginosa
MRQQRLGKSLTAPAIALYEPAGLLLAKFYPAILPYNKETAEALTC

SEQ ID NO: 48 - protein, 52 aa, Pseudomonas aeruginosa
MLLDFDESVYIPIDCITIYTDAMLVDFAAYRDDSIDLDVDVVTKHANNFIFV

SEQ ID NO: 49 - protein, 130 aa, Pseudomonas aeruginosa
MDENYIIARSIKEANKFIQTWEEADIEKLTDDQTRAAIGFASKINSELREWIRMHLDGEGTAHEEGYLKEQQAPWKKANTGDLFTDFGWWHRIANLMLHTAYINHAMLGGDRYHSRLMKIFRDRFSYPEE

SEQ ID NO: 50 - protein, 67 aa, Pseudomonas aeruginosa
MTEEQFSALAELMRLRGGPGEDAARLVLVNGLKPTDAARKTGITPQAVNKTLSSCRRGIELAKRVFT

SEQ ID NO: 51 - protein, 198 aa, Pseudomonas aeruginosa
MSNELINPLQQLIAKASKTLPATTGRVATHQARLDRRQGEVIILADISASMGCTAWGQRRKIDVLREAVDAALERQPARLIAFSDQPREVQHIPEPESSTNMTAALRAALQFNPGVTLVISDGQPDNEKSALEVAAQFRGVIDVLYVGPEIDRAAMGFMRRLAAAAGGDMVSNDISSQAGAQRLLTCIAGLLPGPSRA

SEQ ID NO: 52 - protein, 60 aa, Pseudomonas aeruginosa
MAGPFGAPKASIDLLPFGGQRFGESCLQRWIAPGRLFCNGDGQLDELVITQAAEVQLIHS

SEQ ID NO: 53 - protein, 124 aa, Pseudomonas aeruginosa
MAYEKTWHRDYAAESLKRAETSRWTQDANLEWTQLALECAQVVHLARQVGEELGNEKIIGIADTVLSTIEAHSQATYRRPCYKRITTAQTHLLAVTLLERFGSARRVANAVWQLTDDEIDQAKA

SEQ ID NO: 54 - protein, 227 aa, Pseudomonas aeruginosa
MCGRVAQYQGAREYAQLMADWPFLDLTDGEPLERYNVAPSTQVAILRLVGEDLVAQLVRWGWRPFWAQDRAAPINARAEKVAHSRFYSAVWKHRAITPIDGWFEWVDEGGARKQPYFIQRADGAAVLCATIGQFPELDRQQEERHGFVIITADAQGGMVDVHDRRPVVLSPELAREWVDGATPPERAEQMVLQEGEAPEVFTWYRVDRAVGNVRNQGAHLIEPQRTG

SEQ ID NO: 55 - protein, 143 aa, Pseudomonas aeruginosa
MPVTILGPVAGSGASLRLYSSKVSAGFPSPAQDHLEREISLDEILQIRAPHTYLVRAGGDSMIRAGIHDGDLMVVDRSREAEPGDIVIAAVNGEPTVKRLAKDGSQVVLRAENPRYAPRYILEGDELLVWGVVRYSVRCHEHG

SEQ ID NO: 56 - protein, 46 aa, Pseudomonas aeruginosa
MSMADRAIALIDCNSFYASCERVFRPDLARTPIVVLSNNDLRDCFR

SEQ ID NO: 57 - protein, 385 aa, Pseudomonas aeruginosa
MRLVFATKDLAVAGRSFEGFPLLVGADGWPVEPAQSFLWHTLVESGEALSALTWEAYGRRLFDYFAFLEANGLAWNEESQADGLSVLSRYRDWSSGELELDPSTLNKRLNLIVRFYQWAKQRDLIAALPFGERRVRATPHSGFLSHVARPNAESTKPSVMVRERKRLTKFLTKDQAKVCLALDADPSHRILFHLMVRTGLRSCEARTFPFKYVFNPRLKKGLRPGQMISVALEPSDMHLKYGRPRTIDVPWSLMEEMWSYTLHEREVRKAAGNGRATALVLTREGRQYTKDSIVDVMKAYERKCGFYVRAHMLRHTYGTYTLLALRKSRDFKGEPLLYVRDRMGHSDVQTTMVYLHLINQLEAQSVLAHEDEIDMMFMAVSTPSI

SEQ ID NO: 58 - protein, 538 aa, Pseudomonas aeruginosa
MARKKNYKAEMQSVTKGFETVENELRIDLPKNPRNVTKIDHSQYIGFGFDAWAIQSIHVIRALVNGGNFSLATLVGYSSNGLRYFMAFLKSGTIDSPPSTPNSLTKRHLERYVSWLKLKYPNGSTAKNYYTSLKSLIISLIEYGFVEADKDDLLPAVPFPHTAKSTNDAKPLSLSEMQGLITALKSDLVAIHKGLFSGNDAEAMTVLLLITAARSGINTTPLLEMSRDALQPHPFIPNLRLLNTVKRRGKGAQSKTIRQTELHDGYNPIPLDGVAVVNKALAISEPLVGFAPEKLKSHVWLYRAGQNGHGHRVVALASSTLFQSTKSICARHALKDDQGQPLIVNLSRLRKTMESRLWKLSGGDLLEVSAVMGHSPSVADNHYLKINDEIKVEGATFVGEAFTDQLRGINVTPTPPGGCKDSLYGSLAPKDGVTHCSEFIHCLTCPSYAIVGTLGDLYRLFSYQQFLHAEMEYFLTDEWAAWRKRQGDFIRLIDEFTSRKFKIELIEAAKAKAKASPHPFWGCKIEFMRKVRGDALVG

SEQ ID NO: 59 - protein, 614 aa, Pseudomonas aeruginosa
MSANRNSRAALKAYDVLFAQPVTASGLSKAERDAIVISAIVNDRGETLVLSRFGDARWDLRPFFDQSNVNEGHKYVSWDFNLPPEMIDDCKAVAYAWFKRGLPGSKPPVARGITTLVSASVIPFIRWLSDLELERFSDVRPIHISNYIHHCKSESLRPMPLYSRLRIIDFLWIFSAETLSPLQCFPWGDSSLWRVSGIGEARGTSAANKNTGRTDIIPPDDQAKIFNYCEQIVHKTKEDLKATGIDTFTRRSPKMIRCRDAVLYIASITSGMRNEEVIGIEVGAWRKEVVDGVTYCWVTTTEHKTGKGRVDYLVPELTLDALNLFAMCSTPMRRELEAELSDLELSCNSVDSADLLLRLEKARKDSKRLFLCLNGYGNKAERVGHIEVLSAAGSNEAFKRVAKAAGSDWPLRTHQCRRTYARCFVESRMGRTSLVFLKWQFKHSSMSMTQLYASNPLQDLTLFDEILQQMTEFKIDLIESWLDDQPLAGGAGERIMELRAIPIKDRSALLAQTAPHANIRATGHGWCIATERGCGGAGLYEATRCPGCKHSVIDETFATTWQGIYSHQLELMEIDDAGPAVRQRAKRDMQVAFDVISSLGLSPLDARDSDPTRT

SEQ ID NO: 60 - protein, 142 aa, Pseudomonas aeruginosa
MKVPTLTNKPTAQRSSGRSRQKTSEMLDKVIDGILSTNGKLSISGVAKAAGVTPGLIHNTYPAVAERIRGLMGKSVRAQRDSKHQALLKERELNRALRAENAQLSQDLARLASVNQTLILELAQLKGVATGKVVLLSSKPAS

SEQ ID NO: 61 - protein, 60 aa, Pseudomonas aeruginosa
MRDKADAILVAETVKKIEQLGATAAGRGEAKRSPAVRLQGRYVLLDQMQRGPAPLMHKGK

SEQ ID NO: 62 - protein, 136 aa, Pseudomonas aeruginosa
MHNAVESLTIGAFAKAAGVNVETIRFYQRKGLLPEPDKPYGSIRRYGEADVARVRFVKSAQRLGFSLDEVAGLLRLDDGAHCDEARVLAEQKLEDVREKLADLQRIESVLAQLVDDCCASQGTVSCPLIVSLQASK

SEQ ID NO: 63 - protein, 116 aa, Pseudomonas aeruginosa
MSESRNGRGALLTGGLAAILASTCCLGPLVLIALGFSGAWIGSLTVLEPYRPFFIGAALVALFFAYRRIFRPAQVCIPGEVCADPQVSTIYKLVFWVVTALVLVALAFPYILPLFY

SEQ ID NO: 64 - protein, 91 aa, Pseudomonas aeruginosa
MKKLLAALALIAVVSPVWAASQIITLSVPGMTCAACPITVKKALTKVEGVTKAEVSYEKREAIVTFDDAKTSAQALTKATEDAGYPSSVKQ

SEQ ID NO: 65 - protein, 144 aa, Pseudomonas aeruginosa
MANSFNLFTRIGDKAGSVGVLVSAIGCASCFPALASLGATIGLGFLSQWEGLFITTLLPLFAGVALLVNALGWFSHRQWRRAAPGLIGPALVLVAVFLMLAHGWRSGWLLYIGLAVMFGVSIWDFVSPAHRRCSPASCPTPPNQ

SEQ ID NO: 66 - protein, 560 aa, Pseudomonas aeruginosa
MTELKIIGMTCASCVVHVKEALEKIPGVHRADVSYASGRAELKVDEAVSREQMQAAVEALGYRAAFEDITLPTRPGLLDKARGWLSGGTDAGKEGDRLHVAVIGSGGAAMAAALKAVERGARVTLIERGIIGGTCVNVGCVPSKIMIRAAHVAHLRRESPFDGGLPATPPLVLRERLLAQQQGRVDELRHAKYEGILESTPAITVLRGSARFQDSHTLSVELVEGGERIVTFDRCLIATGASAAVPPIPGLQDTPFWNSEKALASSSIPQRLAVIGSSVVALELAQAFARLGSRVTILARNSLFFREDPAIGAALTAAFRLEGIEVLEQTQASQVAHANGEFVLTTKHGEVRVDQLLVATGRTPNTHGLNLEAAGVQLDERGAIQIDQGMRSSKADIYAAGDCTNQPQFVYVAAAAGNRAAINMTGGEAMLNLDTMPAVVFTDPQVATVGFSEAEAHQAGLETDSRTLTLDNVPRALANFDTRGFIKLVAETGSGRLLGVQAVTPEAGELIQTAALAIRARMTVQELADQLFPYLTMVEGLKLAAQTFSKDVKQLSCCAG

SEQ ID NO: 67 - protein, 138 aa, Pseudomonas aeruginosa
MNIKTNELGRGDSLRQTWQVISFWGLPAVVATLTILLADRHPTLFLAASAALAVMGGACLVNAARCRRLHCYLTAPYFLLLALGGLLAYGFDPHGEQFSRLWLLLALGAAPLLIWLPERLAGRKYLGAPGCGEGRECR

SEQ ID NO: 68 - protein, 384 aa, Pseudomonas aeruginosa
MGEPYFKIRNKLQRLGIRAFSSNYALYGDMSQRVMTLLEEMAPAVEVYSIDECFADLTGVPGDLVRVGREMRARVLRCTGIPVGVGIGTSKTLAKLANHGAKKWQAQTGGVLDIRDPARRDRLLQACEVGDVWGIGRRMTEHLSTMGIRTAWDLAQADAWTLRTKFNVVIEKTARELRGTPCLELEDAAPPKQEICCSRMFGKRLHDLPPIREAVATYAARACEKLRAQGSVCKRVQVSIRTGMFNPDEPKFAKGVSMELPYPTDDTRLITKAACEGLELLYRPGFAFSKAEVLLLDLRQPGEFTGDLFAEVQPERATKAMAVMDAINARWGRGTVRPGGVPAAPEWGMRRELMSRAIPRGWTNYGRCDNSTFFMNSTPYMMLS

SEQ ID NO: 69 - protein, 749 aa, Pseudomonas aeruginosa
MNAQTQPAALAAFPLNINLTDFIDEFGDELLESLNRSNPPVYTGSDNAHRQLVMDRLKRKPFAAQAEVVQAITALLLDRNEQAGIINAEMGTGKTMMAIAVAAVMHAAGYRRTLVVSPPHLVYKWRREILETIPAARVWVLNGPDTLLKLLKLRDQMGDAYDGRQEFFILGRVRMRMGFHWRLACWKKRAAGGQLLAACPDCGQVLEDLEGNLVTVEEFERGDRRRTCSSCRGALWTLIRPGKPDGGNRRATILKSMCRIPTIGPVRAERLLNDFGEDFLATMLVDNVSEFINLMDAKGNFVFSDRQAKRMERSMANIEFGFGEGGYQPTEFIKRYLPDGYFDLLVVDEGHEYKNSGSAQGQAMGVLAAKARKTVLLTGTLMGGYADDLFYLLFRILTQRMIEDGYRPNARGSMAPAAMSFMRDHGVLKDIYTERDGDSHKTARGKKLSVRTVKAPGFGPKGIHRFVLPFTVFLKLKDIGGNVLPDYQEEFVDVPMAPDQASAYQRLAATLTAELRQALARRDTTLLGVVLNVLLAWPDCCFRPEIVKHPRSRDTLAFVPAIFGDEQLMPKEQALVDLCLEEKAKGRKVLAYTVYSGTRDTTSRLKKVLEQSGLKVAVLRASVDTARREDWILDQVDRGIDVLITNPELVKTGLDLLDFPTIAFLQTGYNVYTLQQAARRSWRIGQKHPVRVVFFGYAGSSQITCLQLMAKKIAVAQSTSGDVPESGLDSLNQDGDSVEMALARQLIAA

SEQ ID NO: 70 - protein, 481 aa, Pseudomonas aeruginosa
MALMFPRLARNFARNGYFPTDEVTLERALQALAPAPSGRMRICDPCAGEGVALAEAAHILGRDKVQALAVEYDRERADHARGLLDRVLHSDLFDTMISRQSFGLLWLNPPYGDLVADHSGASQYQGSGRRRLEKAFYQRCLPLLQYGGVMVLIVPHYVLDDELTGWLSNHFTGLRIYAAADPTFKQVVIFGIRVRRQDLARADANQVRSRLQAIGAGQEKAEEIPAAWPWEPYVVLPATSELEHFYRVTLEPEQFAGEIQRLRGLWPDFNLHFAQAGLQPRPPVRELSRWHLALALAAGAISGVVRSKSGRILVVKGDTYKDKVRKTEFTEDEDGNITEVRILTDRFIPIIRAWEMTPSSVNQGRVLTISSSAATTEEAEEPQPEPAPEPLLFSPGQVVMTAAVSHLVETGQLNPAPLLNRHLAGDWGTLDQEDWNTNQRALKFGDRLLSSYDIDAGGESRLWIITEADRSSTTLLLPSDY

SEQ ID NO: 71 - protein, 201 aa, Pseudomonas aeruginosa
MPSPTPLYQIEECPDLYVDACVCDEQRNLVFLSAWGRDTVTQEFLARLTLGREENGIDHFHIIVDGRRLPVFPNQDLLEKRTTRQFRGTLFGSLLNLWLFDRRASAPDRSNHLAFALLQRDEDPHQRLWPLVMETCPLPLLQHWREPVMEVLTQHQMLTALPGTIGNVCAWRLALRVDVLEPTLGELIRESILTTDAQAQA

SEQ ID NO: 72 - protein, 84 aa, Pseudomonas aeruginosa
MHPLFTNLTQETLAYLEDQLSNNDVAGDDELIDLFIEELSLTLEQAEAAVALRDQYLCQVFLNGQGPLHQDDGLSFDPHTKSVR

SEQ ID NO: 73 - protein, 120 aa, Pseudomonas aeruginosa
MGWLFSHQTKEDLLRELLAPTSTFAGSTEVLAHAVSGNELWTVVKRTFHLAGFYFGKPAGHSITMIELHLLDCSAGQWGYKTIPEKAGPFYYGCPLEFLDLAHDETNQEWRDRLTQEHQA

SEQ ID NO: 74 - protein, 256 aa, Pseudomonas aeruginosa
MINIPGQLAIRTINGRNGEFNVGKLSTSIGEFVIKDALLDQHIEGKYRGDFAITEIRPSYYTTGGRLVVEIRAKLDSMTLDDVDNLSDEEAERLSGNEVDPLDEVSAIQQPTAAPAAPPKSPPKTKPLRPAATGDDAPFGMDPPASAKQAAPLDTDADVELFGTVWPLGEIVKLDTTVDRKRLRQQCVRLGALGYELDFKQQVWTRKANAGVNQSLDDDYERRTAARSATATCSTHQAISAMAVSAAAIGVALSTS

SEQ ID NO: 75 - protein, 116 aa, Pseudomonas aeruginosa
MTSLNNHSSAGHTAAYLKLPIVLTNAAWLRLVYLANPARVDEMGTRLASVVQTAWQELSLQPTAKHIQFHLYHKEEEGPDRALALLVLSIVEPSDEPSYLRIELQEESLPGTPDTE

SEQ ID NO: 76 - protein, 235 aa, Pseudomonas aeruginosa
MTQLNPFIRGYESFRIERNLQITDEGNNLPCYRALHETQQHLPDEYFQCELCYFNNDFAVVVQELDDERVEKCPHQGIVRNVLYSIYGEQDGRKKLIGDQYSLTEAESVVRYLSFGGGYNRCWEIRKTHLPISAWNSLYERFSTKMPVRLPSVLVSLFWCNEHGAVGFRLHNTPWTDECLEILEMTAAALRQEQLAFGLDEHLVDLLHLAGQADIRLLVLDPFAPTLKGLPLYDD

SEQ ID NO: 77 - protein, 96 aa, Pseudomonas aeruginosa
MEITMNTYPERLPALLNIGVHAAQSRFEYIQCKGRVDEFGDAGLSIELYVIQDAIEALAQADCEHGCDSSTSPVLQYYGLVERYQKARRKEEHLSR

SEQ ID NO: 78 - protein, 77 aa, Pseudomonas aeruginosa
MGLVFPTERRITMQYGKLALAHLRLELPLQVLMSNAGFYIGTLDEEGPASRESVEYYPSRELAQQALDNGTWSQREY

SEQ ID NO: 79 - protein, 52 aa, Pseudomonas aeruginosa
MSNIQIVDLPALPEVEEVCLTDVEDELLLSRHFCNFAWLFLASNNSQVSALA

SEQ ID NO: 80 - protein, 162 aa, Pseudomonas aeruginosa
MSNNTQAQEAKYFDLHTTGIGYLNRIREVPIRRGEPFLAVTVAALHGAADSVEYSYIDCKVVGAQAEKLVRRCKEAVEAKKKVLISFRIGDIWADPFIHQKGEKQGKPDASLKGRLLFISWIKVDGTTVYDAKEEAEKAQQGQGEPQGEPAAPAEHAEQAAA

SEQ ID NO: 81 - protein, 44 aa, Pseudomonas aeruginosa
MSQTEFGMIIMTSLVVICSGIALWFSWPQVKTWCQKHRILPRHH

SEQ ID NO: 82 - protein, 58 aa, Pseudomonas aeruginosa
MKSKRAAFADDLRKIGTTAVAASLVGIFLSEHRLLTAYAFVMGMVIWLIGIALTEEEE

SEQ ID NO: 83 - protein, 129 aa, Pseudomonas aeruginosa
MSKQSTSFEIGFALGSVVREFRRALSRPPVVVHAQAPVASSVQRIAPAMLAGPTAKELEHISDVPAIVRLKKVNLNDWYLANTREVQKPKRARKSKPAKAAPKAKTPVRKELKLGSLDQLIAPVDPLTC

SEQ ID NO: 84 - protein, 58 aa, Pseudomonas aeruginosa
MSLTTSADHALIIEAGGESVKVKQEGERMQRAESEGGRARLVETLSKVSPAVSGRGVK

SEQ ID NO: 85 - protein, 145 aa, Pseudomonas aeruginosa
MPLMWIVLVLALITGTWLSVQSNHATSSAELAEVDTLARSLLLYRSRLAEYAHANPGFSGSPADSALGLPAWFRKPARLQGYIAAGTSYAFIASPPAGLAAAVDAGTESDLVGVRRNGQLVTRRLGATAIALPAPIPEGAVVAVK

SEQ ID NO: 86 - protein, 442 aa, Pseudomonas aeruginosa
MRSKRSSGFISIELMIALVVIAIATAGGISVLMSYLDGLDEQHAAQQQQQVAKAAEKYLKDNFSTVLASAGATAPAVITVPMLRNTRYLPAGFRDTNIFGQQYQVLARKPAANQLETLIVTTGGQVASELSIRRIAQLMGATGGFISKTNTSIAQGAAWQVALSNFGSAPGAGHLATALFFQDGAIANEYLYRNAVPGHPELNRMNTTLDMGGNNIAAAWAITASGNITTSADISARNVTATGTVKAGTADVAGETYTGGWFRTRGDTGWYNEKWGGGWYMSDSTWVRSWMNKNVYTGGEMKAGKLTAEGRTEVGEYLQLKGVATEGADCSPNGLAGITSTGLWLSCQNGKWGRTAASMRMNTTAGVIKDWCTLHGQDSGMMYYDYVRYAITCGGRFCAVGFNQTFGTNYSFGLITEIGPGFNYPEPYKTPDSTNVTVTCVN

SEQ ID NO: 87 - protein, 313 aa, Pseudomonas aeruginosa
MSVNPIIQAQFVDLYLGEGFADVKGLAGAGARRVEVPREWESHAQELLQLCRQTLEELQDPEFAIIVDGVLLRVTLLEDAFSGSVFVLRRSTAQLREFQEIGYPSEVVSALMDPQLQGLVLFCGEMATGKTSSAASLLLARLQELGGVGCAVEDPQETNLSGQHGLGRCIQVRTSRRSGGYSEALLRTLRAGADLVLIGEIRDEDTAYQACKASLTGSLVIATIHAKSCHQAIERLVTLAQPLARNAYDVVAEGIQAVICQALESDGSSRRLTAEPLLFTGDDGPSMRDKIRRKEAHLLQDDQARQSRQSLWR

SEQ ID NO: 88 - protein, 176 aa, Pseudomonas aeruginosa
MSTTQRTSRPTQGGFVSIEMIIVLIIIAIGVGLGLAAAAGMFSSSNANEEQRNISVIAANARALKTSSGYGSSGTNLIPSLIAINGVPKNMSVSSGVVYNVYGGSVTVSSTGMGFSITTSKLPQDACITLATKIAKNTFEQTKINSGSAITGEVTTAAATQACSSDSNSITWTYSS

SEQ ID NO: 89 - protein, 328 aa, Pseudomonas aeruginosa
MGGFWEQLQFAFYSKQFGRKERLQFYESMSTLLENGVPLKDAVAEVHKIFAHEGQHPFHPVAIASREALMGLSNGKRLATAMALYLPAQERALIEAGEMSGNLVQAMGDAVSLVEAQARIRATIWQALLYPLALSAMMVFLLCIVAYRMVPSLARLSDPVTWTGPLATLNAIASFVTGPGIYVLVAVITLTVVVIVTLPTYRWKGRVWLDRTLPPWSIYRMLQGTTFLLNMAVMLNAGIRPYDSLASMIKISPPWLKQRLESCPLTAWAWARTRESPFAAPVTISPTDRPSSTCASSPTGEASPKRWSSSAAAGRRPASSRSSWPPGW

SEQ ID NO: 90 - protein, 206 aa, Pseudomonas aeruginosa
MRLDPDYMMIGEVRDLFAAVAAFRGAMTGHGLWSTLHTNSAIGIVQRLKDLGVDPGLLFDPALLTGLINQSLLPKLCPHCKVRFQDHQDQLAPDLVERVQRLTDVSQVHVKGPGCQACRGSGVNGRSIVAEVVLPTLAFMRVFAKGGPAEARNYWVKTMQGITKHAHAIRRINEGMFDPQMVEDFIGPLDFDEHLLDDSFYSQEAC

SEQ ID NO: 91 - protein, 301 aa, Pseudomonas aeruginosa
MTNLQIAALVQPSMVTQLLTADGGEWEVSKHLQEIMALAADGTLYLSESHQNDIHVLSFIDRLDRRGFRYQLNLTDLQTIHQLYRAVAMDGLVDSDGQRATQMQERVVKIIRKATELRASDVHFVVSPAGTGSKIRFRVDGLLKTVEQYRSQELHELCATIYQSMCDVAEPLFKPQLDQDARMSQAFVEKLNLFGARIATRPRAGGFLMILRLLYDDTGLDSLEQLGYLPEQNALFDRMMRMPYGINILSGPTGSGKSMTLKVTMEGLDKLHGGSKHILTHRGSTGIPHSRRRHQPDPTGL

SEQ ID NO: 92 - protein, 177 aa, Pseudomonas aeruginosa
MRTEPIGMAVAVLFLLASGQACAGTVGELAEIQAQAILTEAKVRLATAQRQLEGKGETGQVVSAQGQTFAMPVPAPPPTITQPVPPVVRTIYGAGGKMTATFLFPGGYEVDAASGAELPGNYRVESISLDQVVLTDKDGNRVPVGFSSVAPTQAASSAQGASVPPALPGAVPQPFIQ

SEQ ID NO: 93 - protein, 441 aa, Pseudomonas aeruginosa
MEKPDLGSRGPDVSILSYHGNKFVSGLFWRPLSSQRQYMKEARKLGKEEHLDIVAIRHSPTVIQAGFVSKSQGAVKGMYSLASALSGQFEGDFLACWKVDEDRYALVATLDGAIVPGQDLVTTFDEARDRIRKLSTRGVLRNAQVFVPEGFEFPVKDFDIEELLAPKRLRRDYRLRQLTFGLSAREWTAVALLGCLVGGSLTAYYLWNAHQQELARQAALLEEQRRLAELAEKNAQAKQPLDLASLQKPWTLMPDLEDMLRACSKATGVLSLSIQGWLFESSKCDGRVLVATYHRTGNSTAADLTAASQHLFADRPAFVIDNGNTAGLKVDLKVAIGSDEPLQPADDVLQALTSHLYRQGVEPKLSISQETTPPLPGAEAATEQQVVLPSWKKFTFSAQTRLPADLTFQGLPAAGVRITNLETTLKDSQLDWTVTGEIYAN

SEQ ID NO: 94 - protein, 569 aa, Pseudomonas aeruginosa
MRAPLKNLLPCLLIPALASCSVTRVNESADRVEATADSASTIAAQMRNTRPDRRDTVVFSDKPWVSTKPLSVSHTLSSDCIVTWRPAGAASLQEAAQEVINQCHLAVSITPDALNPAAFALQPQQRASNAPPPIQGGQDMATMLFPASVANGMSLGAGGSMGSSFGSYGPRSLYNIKWNGKVSGFLDLIAARAGVSWRYNPTEKRVEFYYLDTRTFRIYAFDDVNTVDSTVRSGMTTAAGISGDGSGSTGQNGSSGISGDSGSKQTTSSELKTSILSDIENSINSMLTPSMGRMSLSRATGTLTVTDRPEVLNRVQQLVNRENESITKQVLLNVNVLSVALTDKDQLGIDWNLVYKSLNNKWGIGLKNTMPGIDQSAISGSVSILDTANSAWAGSKAMVQALAQQGRVSTVRSPSVTTLNLQSAPIQIGRYDSYLASSQISNVAQVGSTTSLIPGAVTSGYNMSLLPFVMESGEMLLKININMTSRPTFEMQTSGDSKAQFPSYDIQLFDQKVRLRSGETLVLSGFDQTTEDTNKVGTGDAGFFGLGGGLTRNTKREVIVVLITPVVLG

SEQ ID NO: 95 - protein, 374 aa, Pseudomonas aeruginosa
MTRQLTTLTLCLLLASCTTHKAEPARPAFDSSRNPDLLSPDLYPNGVQPEKEPVVRYGRYTLVSTQPDAGQRDLMAQIIDVTIPSSMNPSVKDAMQYVMSRSGYSLCPAEAGHVNILYTRPLPAAQYKLGPMTLRNTLQVLSGPAWQVKVDEVARQVCFVLRPGYQLPPTPRPKPVQQLYAKPAAPTPAAVAQLSSTEKVSTLESPVVVASVPTPAPITTSPAPTKKPESTTVLPPAAPAKDGHPSSPPAASAPIKPLASTVKPTPPTPASVASAPPVKVLTPAEPSRQLAQSWSAETGSTLRDTLEAWAKRARWTVRWEPLDLNYPIEAPLTFHGSFEDAVSELFPLYDAAERPFLVNASRPQSLIIIKERKN

SEQ ID NO: 96 - protein, 657 aa, Pseudomonas aeruginosa
MSRPRLVNRTSATPSTLLQRAIFDGYDFGLKIPYIAGSNRALLELSGFFISAREHPLHRYWRVPKGKLLPELDSLYNRLAELAGGLHSQSWRDFSGMVESAQASLDRQAFTWGLLLRIAPLAEGGVLLSGEFHPGVVAVARRMRGVFLRPSSSWRIDATTELLRSNLILELGLAEEQFEILDTVQELLSDGSFAPATELPSMSIGGPQQEPAALSLEDESACDIYLAAVPEIERTEYSSADIEAALQGYSLLAHQPDGIAHLLQRTSALLADDMGLGKTRQAVIAASIRAAGRPILVITLATLLINWQREIQEVYPSATVAIQQDTPEAQWILVNYEQLSPFVANASRFAVMVIDEAQRMKEPTAQCTRHGFDIAAQVPNRYLLTGTPVLNRETELHTLLRLSGHPIGQLPLKEFCDRFAGNPEFRQSLRAELGDWMLRRRKDVLPSLKGKQRQLLKVALSTEERQQYDVLRLEDRPVFARLGALRRYLETVKVRVAMDLLSELDAEDKVILFCEFKPTVAALKELCEQAGLGCVTLVGNDSLTKRQKAIDRFQQDPDCRVFICTTAAAGTGNNLTAANYVFFLGLPWTPGQQEQAEDRAYRNGQLRMVVVKIPLVEGTIDEQLWQLLNAKRQVAQDLIEPEQVDGNRALLAASLTG

SEQ ID NO: 97 - protein, 629 aa, Pseudomonas aeruginosa
MAPPDRTSPTEPLQDPSLARYSERQLAVANTWATHFSLAGTARAKFIRHYLRSTSTTRCWCITVAADNGVRYTIMRAGPLLQVFDGQLIGAWECNPAHRIPASTPSPAGALKLLQRLQTFDDAVAVLSSYTKRAHDLATQMARVDLGLQRRLVYPSHSNKRYYAPRRQFYLKQIGAVLRTFRQAVDQNLLFAIRSVRCLSPQLYNWLAQGDQRRRLQMLKAQPILTPLLVDCEEGVWPHTTTNDNGESIRHFLPCPFSLLDSERPQATTMPCDWYLDMGRILGQVADEGISVINFFAWLFQAPRASIRFLSHVSPGRAGGALFHRKREGRHSGWHALLLAASLGNRRPITRAQWTAFYAAYNAIPWQIHNAKPDYNRLFNGCPSDWQDPAWLAITARLRDIKEFYTALDQGNSQVVRQARSALKAYLGHCTYRQAGNLVDDYHQVQRELRATVQSSLADLVDTDEYTTWEGMLPVGLIACPNGLQIAELRCPADLYAEHIALAHCIDSYDQAAYRGDCRLLSVREAGRPLASAELELRREHGEPLGRPWNPQHLSTVQLREFDNAPVPADSPAGQAYRWFMERIRSGAIATNLNWPDMTVHMTRFADGRWKAGLAEATAKWLLTRLENR

SEQ ID NO: 98 - protein, 250 aa, Pseudomonas aeruginosa
MNMQTSTDRNLNFDFVRRQVEQPPAWASEVLLSWEEAYPQEKHAFLQSHYWTETGSINVFRVVGTDRKDYRGRSWLDFLTGGKRMQRNLQALLDNPSYYLQPTERRPAIHYNTLDGLSFYVGSDGNHRTCIARFFLAEQQKSQLHDVTLNHYQVNDAFYRLYGQLRQQVLLQGLPVQVHPERVQLGREDTAGWKMDTYQTTLNWLNLKTQEEISLNEAQAREQLIDLIRRKPSEEQPRGWKARLKCLISD

SEQ ID NO: 99 - protein, 639 aa, Pseudomonas aeruginosa
MHLVIIEAPGKLKKLRSLLPSIRPDVTWQVEATAGHIRDLPVHGQDPQMLTVGVGQDFKPHYQILSGKEKTVARLKDLQQKALEIYVASDPDREGESIGWHILQAAGIKNYKRVAFKEITKSCISAELSSPRRLDLPKVASQECRRVIDRLVGYLVTPELRRVMGKPTTAGRVQSVAVYLVVLREREIRAFTPIKHFGVELAFVSPSDGRTWKAEWDPVPTFASKEFPYIQDRQLAELVGAIRNVIVETCIDGEETDMPPAPFISSSLQMAAGNALKWSPDKTMKVAQRLYEQGLITYHRTDNPNISKDSMPDIRAVAKALGLKCVEQQRMFKADQDAQEGHPAITPTDWMAASAGETADEQALYQLIRVRALASQIEAAVYAVRTITLLGVGPDKKPLRFGAKGKLLNVPGWRKLLQGDDAEEQKNETPSSPIPALEPGQILKVYSGEVLEKKTTPPKRFTDASLVGEMKRRGIGRPSSYASIVKNIIDKGQVQMKGRSLIPGELGEATIALLEHNFSFLSLDFTRNLEVALDRIANSEDTYMNVVQQFYQLLQSELQTLRAHPSAQGDPRASSTASAPTAPASDFLCGKCGLPLVHRKKAGKGGFDFWGCSGYRSTGCKVSYPTKDGQPDFDNPRGL

SEQ ID NO: 100 - protein, 64 aa, Pseudomonas aeruginosa
MNSKDDQAGSHCSFRDRDEPLTRQPLSADEISVLECMALMEEEDRASFIRIAQGIADATVKRRS

SEQ ID NO: 101 - protein, 162 aa, Pseudomonas aeruginosa
MATPVFWEGNIGSAPEHRSFPNGNNPPRQLLRLNVMFDNSIPDGQGGYKDRGGFWCSVEWWHQDAQRFAELFTKGMRVKVEGRAIMDRWPDKESGEEVQALKVEASRISILPHRLAEVTLLPSTNGQSTQHQQSRNVPQQPAQQDAQSQQDYDSAFDDDIPM

SEQ ID NO: 102 - protein, 177 aa, Pseudomonas aeruginosa
MRQLDKDQQGALQQSAFRPLQQTAFQALQHSASLKGLLKPFKGKGELAQLAEQCEVLEQGLLELAQRLLAQVRRTPFTLLPARLIEQRTSARTTFLRWQHIATRRMGVGVWAEMLRQDKTPEYLLQDLYEMELQRITLNMQISLIHSIGKQAAECAEKMGQAEAEFMGRLQQSTNHH

SEQ ID NO: 103 - protein, 242 aa, Pseudomonas aeruginosa
MAETHRLQIGSLRSDVALTLHTYHAARIWTGRQKSDAKHSILGLSGFCAYVNRMHRGAALDDPYSDWWLVQIEEKVESCQAALKAIDQRLDDVMAKLPATLDISENLSVTPVKVPLFISNPLGFKAVYLLTNYDELARRILLAQHVGLVGRRDMEVWLDEGASVLRSLFGLAQSYQFSGATRDDFAANNARAEAARKMYEKFGEIPQDILEGTRRSNFAPPITRGRSDGDADDDADRVELED

SEQ ID NO: 104 - protein, 65 aa, Pseudomonas aeruginosa
MCDSIVYAPMDELEFERLLGLATLFNDNDEWPIDFTELQELSELLGKLKSCVDVAIDNAPEGAKS

SEQ ID NO: 105 - protein, 79 aa, Pseudomonas aeruginosa
MFLSMAPFFLVVLVLSALFTDAWNDRELRLLLMLTVFGYSLTVLTITVEMYRFEMAEKAMWGASCNKANYMNCQPDYQR

SEQ ID NO: 106 - protein, 119 aa, Pseudomonas aeruginosa
MKYSLSSKVIFPWGAAGGELGDSARNTLPRIDLGAGGELGVATGNTPPGPGLGAAGAFGVSARNTLPRIDLGAGGELGVATGNTPPGPGLGAAGAFGVSARNTLPKRDITTHEELKQCS

SEQ ID NO: 107 - protein, 308 aa, Pseudomonas aeruginosa
MKTVPRRLLLDKRLTPLERNCWQVFRLLINDDGLTAFPTYEQLRPYLGMQPGKIASRETIAKALKVLRLTRWLSLGRRLRNDLNGQVQGNVYILHDEPVSPAEALELDPDYMQLLSQSTGDSNRAIREIGQITWREFRDDPDVGRRLPTHLEKLEGRLNHQQWAIDSQLEADPAAEFGIRTLPDLPHSTPSSDAELSEISGKQCALPLSSDAEPRQNPPSTPLVRMPNSYSTYTYKQDSVCKKPVQPRAREDAHPNWQDLLNGLEAEQRIQAVSALRRGVRGAASSGHRAVAAPMCGKELSVTPSATS

SEQ ID NO: 108 - protein, 60 aa, Pseudomonas aeruginosa
MRLSRFPISTLLDSASGHLEAHLYKKRLAAESGEPLAQQYSGIIFSGNPHENRSSAPAAG

SEQ ID NO: 109 - protein, 255 aa, Pseudomonas aeruginosa
MSKSLINEAVLTQVLNHLRNGQLRRCAEMGLRPEILAQLQQPAVMSILTNTPVSWVDVRVNIDVMEKILATAERSQQEELQIERALKLGATTTMIQSFFGLSPEDTAIKRLIMEIHPRRGRWRQLDEQIERQIWFRWEHLMQENQVRLEDSMELLDIAMILTEEINAGIEQDSPEFISLAIVWSLIQSWLKDGLYPSGKSSQSQAGLQKSQSTLYLASVSSHLPHSAPSATTQVNAETERQQLLNLVQSEGDTAP

SEQ ID NO: 110 - protein, 544 aa, Pseudomonas aeruginosa
MSMAKINPQDLKDRLLAPGFTAPPKVLEQLSDPVSDTPMVLTLDQVLPWHDNPRTTRNPKFDEIKESIRHRGLDTPPPVTRRPGEDKYRIRNGGNTRLEILNELYKETGDERYFRFNCLFRPWDKQRGEIIALTGHLAENDLKGDLKFIERAVGIQKAKAWYEEEKGEPVGIRELSRKLTDDGYPVSPSHISRMLDAVEILLPAIPVMLYSGLGKPQIEKLLSLRKSASSCWTRLYAGEGIDFEMLFQDTLAIFDSSPDEFIFDRFQDELIDQMKRPLGLRYDQILLEITNGQQEQRRGTLVDLPAPAAPPGIPAVGQENPAASTTGQAQSQSPAAGLQTSKTNSLPGNPSTPPAPPLPVQQQQLTDEERAELLAGHIVSPVSTKIQQTRQRLAALEGEHLPVFEETALQAIPVQVGGLHPITDLWYIERSIDTPEILRQHIADLAEEIALHVGAPGEIVRIQGGVGYTYREPNEDPEITDSALHLMTLLQALSGQVQVVLNSHDQQTCRDALGEFQFSAGLAQLLLGPTHHRRSAIQPGRTSQ

SEQ ID NO: 111 - protein, 89 aa, Pseudomonas aeruginosa
MKNVTSISRKHAEDKFVVRMPQGLRDQLKQKAAHNHRSANSEIVYRLERSNALEEELARANRMVDELFAKNQRLQAELAAANTRQVAEA

SEQ ID NO: 112 - protein, 153 aa, Pseudomonas aeruginosa
MPIKHAIVHLIEKKPDGTPAVLHARDAELGDSQAIENLLADLNESYNAKNKAWGFFQGESGAYPFSGWLGEYLEGDRDFGGMVVLSGYPCPLYDELYSTWHRVDRHAYADGSRERIECLWLNSAALEGLAQLDFFKAGNASPSPSFQTMAAHY

SEQ ID NO: 113 - protein, 77 aa, Pseudomonas aeruginosa
MRSFLRGARESVRRLVAFAQAEGWSVDRSAGGHLKLSKIGCASIFISSTPSDARGELNARALLRRADRQRSLNQESF

SEQ ID NO: 114 - protein, 79 aa, Pseudomonas aeruginosa
MPDVTAYRPAEDELAQLRTEVRMLRSAHDDLACSRQNDRRSLQTLVKRLLDAAATDSLPRSLAEMETWLQLNSEETTDA

SEQ ID NO: 115 - protein, 85 aa, Pseudomonas aeruginosa
MKASQTYQCIVKFDGAGFWTNTIQKQRATCTWSDKVAASRLAERLFGEDNAYITRMPAQAGDHEKRIESRWELSCRNPKEVAHDA

SEQ ID NO: 116 - protein, 175 aa, Pseudomonas aeruginosa
MNTEARFPSIHASAAFTDSAVVHANQVGVNPIELDALSQVISRLSRDESTVAPSSMERELRELEELGYIEISTTQAGTLVVTTRAPGQLLSAYFWSVWIPRHLFSCSLKVSLMSHLCCGTQDSQHLTAVFRIAGSKDAAREFLHQLANNYPGHEPELPELVAVQVGDALSKEAES

SEQ ID NO: 117 - protein, 61 aa, Pseudomonas aeruginosa
MTTSQHLVTHQCMNCDQHHPHHLVRQVLPAENTPEGEAEVLVCPCCGSYDVHQLEAIRDEH

SEQ ID NO: 118 - protein, 448 aa, Pseudomonas aeruginosa
MSVLELTPPHSVEAEQGVLGGLMLDNAAWDIVGDQLQKEDFFRHEHRLIFTAISELAAKDAPFDVVTVSEAIEDLPEAGGLAYLGQLADNTPSVANIEAYAQIVRDRAHLRQLMSLGHHCTRTASNHQANPSEVQEEIEQKLFALGQDQHKSDFVDINKGLAKIVDTIDYRFNNNVTVTGVPTGLKDLDELSGGLQKSDLIIVGARPSMGKTSFALNLIDAALQSDQQKSVQVYSMEMPAEQLLFRLAALLGHLDLGKLMKGQLQEEDWPRLTVAIQRINDYGSRLVINDQGNLTPTELRAKVRRAARKYGHPVLILVDYLQLMRCPGLENRATEISEISRSLKALAKEMDCPVVALSQLNRSLENRPNKRPNNADLRESGAIEQDADVIMFVYRDEVYHPNTEAKGIAEIIIGKYRNGPIGTVHTAFIANQTRFADLAPGTWQGAHA

SEQ ID NO: 119 - protein, 233 aa, Pseudomonas aeruginosa
MDKQKVLAKVEKLMALANAKGATPNEAETALRQAAILKRQFDLSDAEISAHTVETACVPTRTRRSPAPWLHELAGICASSFGCDYLAAYAMPAGWTFKFMGRGIGPELAAHAYSTLHHQLVAARSAHVAQQKRCKLSTKRRRSKLFVEGWLLAVRSLVRDFAGRPDESTQAAIKAYLELHHPELKLLEPAAPTKPLAYDQASLHAGWEHGKNTRLHRGVSRRVQVALEQGGSR

SEQ ID NO: 120 - protein, 228 aa, Pseudomonas aeruginosa
MSVPKLKPCPLCSSTNIRTLEPELLDTDAWNCAIECLDCQVHIGPSYCEPDPVTARYSAQVDWNRRPSAKSHADEREQFLMANLLAALEVALGNVPALAIVDRVRQVADRIYPTSNLSPVPQAWLDVQAERRRQITVEGFDTSNDDASAGQIAQAAGCYALHAGGIGTDWPGGIRNGSALFWPWDEEWWKPKSARENLVRAGALVLAEIERLDRSATEQGSTCCKGGA

SEQ ID NO: 121 - protein, 236 aa, Pseudomonas aeruginosa
MIQAHLVERDQFGFWTHPNYPDLADNCSSNEAQETLRRLGLELQTVFMESDAPRLYDSARSDQRYSEWIPTRPEGSGWFVLSIHDTENGPVCQYVRPLAESLSPIDFDAAAEQHERLLSEACAKALNQRDAALARVAELEMLLRKLSTNGLMQFSTVDEEMAVQAALGGAPVAQAQHCAVLDAEKLIAQLKDCASHAGDPERAAAFNDAISEVHAMLAAGSSQAKPSTNDGQGGRP

SEQ ID NO: 122 - protein, 165 aa, Pseudomonas aeruginosa
MNLQNRNNLILSLIAETQFDAYVQGYMAKAGAAAGASDNLLVEAEGAAMLQGLVAPVRAQQRACGQPLQNALLQIAHDLLLQTKSQLAIAANASSIHVIQRDMNRAIWNIATAIDHLAEFAQPSQDTVKVIERLMLFVGSSPSPEGQQLAAEASAVLGMSEGGLA

SEQ ID NO: 123 - protein, 245 aa, Pseudomonas aeruginosa
MAKPPITQARDVDAELVLQLNKFGSAADLRSQQAKLTGAAREIRKLTGGGTDLFGKLGCYLSFEQKQLLQDAARLLDSVNQQVEHAKEKRDRDEKQAKKRRELRERLAKQLVASNYPLPGNTLEERLEILQIALIYNRAKVFDPLYSTHQLHSKLKRWLERPKQLIGWRSEAEYFASQVGSLRCDFISHLTHEIAYDDGSEVEERLRVIKQKVADCTAQIALTSEEQETLQLWTDALQSAPEGLI

SEQ ID NO: 124 - protein, 288 aa, Pseudomonas aeruginosa
MNAKATSVVSTKGGVGKSTTAANLGAFCADAGLKTLLIDLDPVQPSLSSYYELPEVAQGGIYDLLAANITDPARIISRTIIPNLDVVISNDQNNQLNNLLLQAPDGRLRLANLMPSLKQGYDLVLIDTQGARSALLEMVVLASELVVSPLQPNMLTAREFNRGTMQMLDGLRPYERLGMRIPKVQIVINCLDQTNDSRAIHENVRAIFDEHQDISVLETTVPDAVVFRNAASRGLPAHRLETRQPSNRTSAPALEIIRNLAIEVFPEWTDRFLALTPEAVAALVKGGR

SEQ ID NO: 125 - protein, 351 aa, Pseudomonas aeruginosa
MSKRRSHRRQQPVTVQSAQEGEFIPRQGGRAEAFTFGDPMPVLDGRGILDYLECWSNGRWYEPPLSMEGLAKAVGSSVYLQSGLKFKRNMLAKTFIPHRLLSRATFEQFSLDWLTFGSAYLEQPRSRLGTRMPLQAPLAKYMRRGTDLETFYQVRSWKDEHEFEKGSVIQLREADINQEIYGVPEWFCALQSALLNESATLFRRKYYNNGSHAGFILYMTDAAQNEEDIDALRTALKTAKGPGNFRNLFVYAPNGKKEGIQLIPVSEVAAKDEFGSIKNISRDDQLAGLRVYPQLMGVVPQNAGGFGSISDAAAVWASLELEPMQARLQQVNELLGDEVISFNRFEVVKSN

SEQ ID NO: 126 - protein, 593 aa, Pseudomonas aeruginosa
MGGSICAMNAAVEIPIRDNRRQAKFLYWMGWRVCDIADHLGEKDKTLHSWKDRDGWDRADSVERIGGALEARLVQLILKDGKTGGDYKEIDLLHRQLERQARIQRYQGGGTETDLNPELAKRNEGPKRKPKRNDISEELTEKLVEAFLDGCFDYQKDWYRAGNQRTRVILKSRQIGATFYFAREALIDALETGRNQIFLSASKAQAHIFKAYIQAFARDAVGVELKGDPIILPNGAELHFLGTNARTAQGYHGNFYFDEFFWTFKFKELNKVASGMAMQKRYRRTYFSTPSSMAHEAYTFWTGERFNKGKPAADRIKIDVSHDALQQGRLCEDRIWRQIVTILDAEARGCDLFDIEELRLEYDAEAFQNLLMCQFVDDGASIFPLTMLQPCMVDSWDLWSEDYKPFALRPFGDRQVWLGYDPAETGDTAGLVVVAPPAVPGGKFRVLERHQFRGKDFAEQAEFIRKVTQRYWVTYIGVDTTGMGSGVAQLVRQFFPGVRTFSYSPEVKTQLVMKAWSVIKNGRLEFDAGWTDLAQALMAIRKTITAGGRQFTYTAGRNDNTGHADLAWALFHALQNEPLEGQTPANTGRMEIF

SEQ ID NO: 127 - protein, 273 aa, Pseudomonas aeruginosa
MKKFRSKWFRIAVEGATTDGRNIERDWIEQMAAQYDPNTYGARINCEHIKWAWPAGEFGAYGDVLACKAEEIDINGQKKLALFAQLEPNQALLELNKQRQKVYTSVEIDPKFADTGKAYLVGLAITDSPASLGTEALSFSAKNGTLASRKTNPDTLFSAAEEGTLEFEEYEEKPSVGAALFTKVKELLKGKEARTQAEFGQVGEAVEAIAEHSRDLGEQLSEQKKQTQQLASQLDKVTKELADLKSTLDSTRDHSQQQRPPVTGGGSVALTDC

SEQ ID NO: 128 - protein, 338 aa, Pseudomonas aeruginosa
MRNETRKQFDAYLAQLAKLNGVNSAVQTFAVEPSVQQKLEQRIQESSEFLKQINVYGVDELQGEKIGIGVSGTIASRTDTTGDGVRKPRDVSALDNQRYECKHTDFDTAITYAMLDAWAKFPEFQALLRDAILKRQALDRLMIGFNGTSAAATTNRAANPLLQDVNIGWFQQYRNNAPARVLKEGKAAGKVVVGNGADADYKNLDALVFDVVSSLIDPWHRRDPGLVVILGRELVHDKYFPMVNKDQPATEKIATDLILSQKRMGGLPPVEVPYVPEKGLMVTTLKNLSLYWQIGGRRRYLKEVPEKNRIENYESSNDAYVVEDYGLGCVVENIEVAE

SEQ ID NO: 129 - protein, 233 aa, Pseudomonas aeruginosa
MAFSPAKAHFLRVTAAQEAAATAPHQGMEGANAYELQLAQLYQDRSRLKNIQSGEGKAALKVELLPAYQPYISGVLQAGKGAQDEVITTVMLWRIDAGDYAGALDIADYVLAHDLVMPDRFARTAGCVIAEEIAEAALKAQKTGGSFDLATLHRTLLLTDQADMPDEARAKLYLAAGHATLEGLSVESPGQPGQVQAGIDLLKRAIQLHDKCGGKKDLEAAERLQKKLTASGG

SEQ ID NO: 130 - protein, 153 aa, Pseudomonas aeruginosa
MSGFIANGPVPSGHINSDPFWPTIELEHVRANLRIDSSVDPARLEVAVIAAVISVNRELRTWRLEKSAAGYAELAEVPSDKVRDTSELVQLYLRAVQSATAAEVAERYRWYDTTTSGNDKAQDIATTIDDYRRDQRWAIRDFLKRPRTTVELI

SEQ ID NO: 131 - protein, 70 aa, Pseudomonas aeruginosa
MAAVAIAHQNDTVEALCWRHYGRTAGVTEAVLEANHGLADHGPTLPPGLKVTMPDIPTAAPERQMVNLWD

SEQ ID NO: 132 - protein, 117 aa, Pseudomonas aeruginosa
MADLTTTATAGAIMGLGLGVTLPVDGGMLFGALLGAWLATGTKQDLKAWSRLLSLILPTCVGYLFADVALARVPWLTNLAFSAFVCALVVIPLSLKAVAWVDKVDFDDLWRRIRGGR

SEQ ID NO: 133 - protein, 90 aa, Pseudomonas aeruginosa
MLMTTVPLIAALAYIAAALRLVCYQRCGARFRRSVSLLASLLGASMAICGLEILLYRPPVSIWHAIVAALLCLLIFRSRGNVAALLRPSA

SEQ ID NO: 134 - protein, 268 aa, Pseudomonas aeruginosa
MTLRYGDRSQEVRQLQRRLNTWAGANLYEDGHFGAATEDAVRAFQRSHGLVADGIAGPKTLSALGGADCSHLLQNADLVAAGARLGLPLATIYAVNQVESNGQGFLDNGKPAILFERHIMYRRLAAHDQVTADQLAAQFPALVNPRPGGYAGGTAEHQRLANARQIDDTAALESASWGAFQIMGFHWQRLGYVSVQAFAESMGRSESAQFEAFVRFIDTDPALHKALKARKWADFARLYNGPDYKRNLYDVKLEHAYKQHTEAHKETT

SEQ ID NO: 135 - protein, 80 aa, Pseudomonas aeruginosa
MRTGAQSGEHFPYKELLERMTKLSPTGCVAVVLPRDTPMEDCQKMADALKHVMAVPPLVICGDVQSLDEAAMNAAGWYRK

SEQ ID NO: 136 - protein, 153 aa, Pseudomonas aeruginosa
MTTLRQALYGAALLSALGLLLWVQQQRIDLAQARLAQAELARKASDAQLSRQADTITALEAALSRERQAQADLDQQRQQLRQALAIRERLIEDLKRDDEPYRQWADQPLPDVARRLQQRPAITGAAAYHQWLSRRDALQPGVSGTEGQRRPTD

SEQ ID NO: 137 - protein, 178 aa, Pseudomonas aeruginosa
MNKPDSLKAHLLAAVPELRNNGDRLVIFIDNGRVRSTSAESLSFEYAYDLQVILTDFAGHPDSVFLPLLGWLLVNQSDLLANLTKVQDGITFEADMLDRSKVDLGIVLPLTERVVVKRREDGRYDVSHPEEPQLTEAIEVDGPMQMLANGELLAEWTPPTPTEAVMLETPQIRRPANG

SEQ ID NO: 138 - protein, 152 aa, Pseudomonas aeruginosa
MADSLEALEDWAGPILRALEPGPRAALARSLARDLRRSQQKRVMAQRNPDGSAYEPRKKRELRGKQGRIRRKIKMFQKLRTVRYLRAKGDAQAITVSFAGRIARIARVHQYGLRDRAEPGAPEVQYAQRSLLGFTAADLDSIRSGVLKHLPP

SEQ ID NO: 139 - protein, 142 aa, Pseudomonas aeruginosa
MSSNSAKRGELARKARSVLGASTAEAAQLVHVSKRTWELWESGQREMPEASWELFVYKITHGITPTDERELLVVVDDNQAPLDVVSSDTFLNLTEQGPGEYEISSMAVSRETGRQYIHRTRFKLKPYNEHVLKFAERHRQWD

SEQ ID NO: 140 - protein, 190 aa, Pseudomonas aeruginosa
MADFATLSRLIENLIRLGTIAAVDHAAQRVRVLTGDLLTGWLPWASPRAGADREWNAPTLDEQVLLFSPSGQTANGVVLTGLFSDLIPPNGDRDALHRITYRDGAVIEYDSAAHHLRAVLPAGGTTELISDGGIRIVGDITHQGDYIQTGNQTVTGKVTVSVDVIAKGISLVGHTHGGVMPGGATTGKPQ

SEQ ID NO: 141 - protein, 114 aa, Pseudomonas aeruginosa
MNAHTGGAIDRLAHIRQAIADILTTRIGTRVMRREYGSQLPELIDAPFNDTTRLQVYAATAMALMRWEPRIRLSRVQITGQNLAGQVLMEIDATLVDSNEPHNLSIPLQMGASA

SEQ ID NO: 142 - protein, 304 aa, Pseudomonas aeruginosa
MTTNFVAIDLSQLPPPHAVEQLDYEQILAERKAYAISLWPEDQQAEIAARLALESEPLTKLLEENAYREMLWRQRVNEAALANMLASAQGADLDQLAANYNVRRLVIQPGDPSKVPPVPELLESDDSLRERAQMAWEGLSTAGPRNSYIFHAHAADGRVGDASAVSPSPAVVVVTVQAAQGNGSAPADLLAIVDAYLNDADRRPVADRLTVQSAQVLEYRVDATLYLATIGPESEPILDAARARLTAYVHQRRRLGMEVSESAVHAALHVEGVRKVTLSNWSDIAATPAQAPYCTGITLTLGDE

SEQ ID NO: 143 - protein, 178 aa, Pseudomonas aeruginosa
MPSLLPRNATELERLAAEALAQIERVPIPLRQLWNPTTCPVALLPYLAWAFSVDRWDSTWPERVKRQVIRDAYLVHSHKGTLSALRRVVEPVGSLTDILEWWQQTPAGVPGTFEITVDVSDNGLDEETVLELERLLDDVRPVSRHLTRLDLRITPDILARHGLATIDGDTLEISPWKQ

SEQ ID NO: 144 - protein, 785 aa, Pseudomonas aeruginosa
MTTPKYGGLLTDIGAAALIAASEAGKKWQPTHMLIGDAGGAPGETADPIPSAAQTKLIRQRYRAQLNRLFVSEQSANVLVAELVLPMAIGGFWIREIGLEDADGKFVAVANCPPSFKASVESGSARTQTIRVQIILSGMEHVELIIDDGIVYATQDWVTAKVAADFKGRKVLAGNGLVGGGDLSADRTIALPASGVGAGTYRAVTVNANGIVTAGSNPTTLGGYGITDALHASEAVTTPTANKLLRLNAAGLLPASITGNAATASRLAAPITLSASGDATWSVRFDGATNVNGVLTLANSGVTAGTYAKVTVNAKGLVTGASGLVASDIPALDAGKITSGILPAARGGTGNGIGQAATAVKLAAPRTIYLGGDASGSTTFDGSANAGITVTLANSGVNAGSYPKVTVNAKGLVTGGGGLTAADIPALDASKIATGRLDLERLPLVSQGLATAVHTSVDPNSVVIPLVLTNHANGPVAGRYYYIQTMFYPSVEGNATQIATGYAGVADMYVRYAYGSPATTDPSKREWSAWVRCDLGGAFAHAPDGVLGGGVNLDSMIASGWWHQPFSANAQNGANYPVGEAGILTVHAPTSSMIYQTYRGYAAGGLYWRCRYNGTWGGWFRAWDSGNFNPANYVAKSEYNWSSLPGKPATFPPAGHNHDASQITSGILPLARGGLGANNATTARSNIGAGTIATASLGASGWWRDNDTGYIRQWGRVTVPGDGTAAITFPIAFPNVCLGGFAGQTANFHPGTDASTSFYNPSTTGATLENGYQFQAVLLWEAFGR

SEQ ID NO: 145 - protein, 154 aa, Pseudomonas aeruginosa
MSASYVFSPSTRVFYPVSLREVYEAGIGWPDDGVPVSDEVHARILLEQESGRVICADAGGQPATKEPPPPTEEVQAAIERNWRDRQLVDTDALVARHRDELEVGTTTLNAEQYQALQAYRRQLRDWPELGAFPLAEHRPTAPDWLDALFADGVL

SEQ ID NO: 146 - protein, 391 aa, Pseudomonas aeruginosa
MAADQYHHGVRVQEINDGTRPIRTIATAIIGLVATAEDADATAFPLDTPVLITNVQAAIGKAGTSGTLPASLQAIADQANAATVVVRVKPGEDEAATNSGVIGGVSADGKYTGMKALLAAKARLGVVPRILGVPGLDTQPVATALIAIAQQLRGFAYVSANGCKTKEEATAYRENFAAREAMVIWPDFLTWSTVVNQTVPAPAVAQALGLRARIDQEVGWHKTLSNVAVNGVTGISADVFWDLQSPSTDANYLNENEVTTLVQEGGFRFWGSRTCSDDPLFAFENYTRTAQVLADTIAEAHMWAVDKPMHPSLVRDILEGVNAKFRELKGLGLIIDAQAWYDPSMNDKDTLKAGKLRIAYDYTPVPPLEDLTFFQKITDSYLVDFASRVNA

SEQ ID NO: 147 - protein, 171 aa, Pseudomonas aeruginosa
MAMPRKLKNMNLFNDGGSYQGLVKSCTLPPLARKMEAFRGGGMNGPVKADLGHDDDGIQFEWTVGGLELTVLKQYGAVSASGVMLRFAGAYQQDDTGAVTPVEIVVRGRHETIEMGDAQPGEDTEHKITTTCSYYKLVVNGEEVIEIDLLNFVEKVNGKDLLEAQRKAIGL

SEQ ID NO: 148 - protein, 109 aa, Pseudomonas aeruginosa
MKTEQTPADLQNAPDNVVTLDQPIKRGAQSIESLTLRKPSSGELRGLHLLDLLQFDVAATMKILPRISQPTITEPEAAGMDPADLLACGQVIAGFLLQKRAKAAASLIA

SEQ ID NO: 149 - protein, 39 aa, Pseudomonas aeruginosa
MADLAVTFHWAPDHMDRLSLTELMEWRERARVRSSADGE

SEQ ID NO: 150 - protein, 915 aa, Pseudomonas aeruginosa
MANDLQLRVLLSAIDRATAPLRRIMQGSDATARALKATRERLKQLNAQQSDVRAFRTQRGALEQVSTTLATQQARVKALAQQMAAAGNPTRALTRDYNRAIREAGFLKQQHLQQSQALQQLRTRLSNAGISTRNLGQHERDLRAQIQAANGAINSQAQRLRNLSQQQERLTHARNTYSRGIQSAAALAGTGMAARATGMYTGDKLRQMLGVGYEFDATMSATQAVTRIERKDDPQMQALRQQARTLPLSSKFTDKEVAQGQYFLGRTGYNAKQILGAMPGMLNLAAAGDMDLGDTADIASNIQTAMGIPAEKMDQVADVLTAAFTRNNVDIRMLGDSLKYSAGVGREYGQSLETVTTATALLGNAGVQGSMAGTSMRSVLTRLGTSKAVAKLGVQTKDANGNMRDMLDILKDINKKTAGMGNVQRGAIFKDIAGQYAVTSFGTLMRAVEGGQFQTMRESLNNSEGEAARVASTQLDNLKGDMTMLHAALENISVELFDKNSPWLRELAADLSHLLHNVGEFLKANPQVSKGIVITVAAFSALMATVGSLAITLAGILGPMIAVRFMLSTIGIRLPGLIGLLKLLFAPIRMLAGLLIGPLVTALRVVSIALWGLAANPVVLAIAAVVAVLAGAAYLIYRNWDAVKAYLLGLWEEIKAGFDGGIGGILSTLMNFSPLGLIYRAFSGVLGYLGIDLPARFTDFGNLIVQGLVNGLLAGIGQIKRAVQRVGDAAIDWFKDKLGIHSPSRVFADLGGFTMAGLAQGLGAGQAGPLSVIARIGQGLVNAGRQAVAGLDSGTRSTITPPAVVAELVAAQRQRSPMFDQPLLAMLGDLGKSAGAIGALVLGASAPAQAITIDNRPPVSSAQAAVSIGGDTYYITIQAGPGSDAADLKRTLSQLLDERERNKAARLRARLQDRE

SEQ ID NO: 151 - protein, 146 aa, Pseudomonas aeruginosa
MMLSLGMFVFSLHTLAYQEFQRQTEWRHASSSRIGAQPARQFVGRGDDTITLPGVLLPELAGSALSLDVLRQMADTGSAWPMVEGTGRIYGLWVIERVTETRTLFFADGTPRRIEFSLELKRIDDGRTDLLGSVLGTAGNLLRRIL

SEQ ID NO: 152 - protein, 428 aa, Pseudomonas aeruginosa
MIDAALARVSGYLTSAVDQLQRDAGYPVPVFRLTVDGNDIAQLISPRLIALDLTDNRGIEADQLSVTLSDHDGLLAIPPRGAVLHLWLGWSDSGLVDKGTYTVDETEHSGAPDVLSIRARSADLRKGLKVKRERSWSSPKTLGDVLTDIALGNNLKPVLAPALAGLPILQLDQANESDANLLTRLGEDFDAVATVKAGCLLCLPAGGGKSASGLGLPHITLTRQDGDQHRYLQADRDSYDGVRAYFYDVNSAKKQEAIAGAKGDNLKDLRHTYSDSQSALRAARAARAEWNRLQRGSATLSYVFAKGRPDLIPELTYTLQGVKTEIDAIIWYGGNVQHSLSADGGYITSLELESKLPEDLVSDLADDTGGDYTGIIAYYRDEKSGTEKTITAGDQSKPRRLRYLYSTKASAKRAVDRELNRLQVRGRR

SEQ ID NO: 153 - protein, 177 aa, Pseudomonas aeruginosa
MTTAESFIKNFIDDNFENPEVQQLYKEAKLGEDSFKDKLAESYLQLYSHKQSQEVFYSSEKQSYITGGGGSSLFPITKDINFGIASFHIVVNQTSSDGYSVDVTSKILGFSVGTSRMSFENGTLHRAEEIGGSSLGASYDVNLKVIGGFGLQLEAHVWVKIPIAGRKSIDFGPTWVI

SEQ ID NO: 154 - protein, 116 aa, Pseudomonas aeruginosa
MNWLKGMTAAVGLMVSCVAMADSAAQVELMDNLHQRMLDALQASSVDQVTEVFGDLDRYRPGIRSTASETCFKAYEALGWVLSDIVVQADMDGPLPELKKHQQDYERKRLACAAGT

SEQ ID NO: 155 - protein, 38 aa, Pseudomonas aeruginosa
MYRPIDPIVLTALLICLSQMSEQDQLDLLRLACALRGH

SEQ ID NO: 156 - protein, 156 aa, Pseudomonas aeruginosa
MKRPLLETRRQVVSAIIGAYPGGRECAAARLGLDLKKFDNHAYENAGSKPLSDDQLLLLEQETGTSHFPEYVAHLYGGMFVQMPDPVQLDNLDLYARGVTTAIRRGEVDRIIAEALRDGEIDEAELAEIIVAHRQHLAARHAEVGAVITLHRRVKA

SEQ ID NO: 157 - protein, 97 aa, Pseudomonas aeruginosa
MSVYKLVCPCCHSRMRIRSSEGQTPCFRSMYAQCTNALCGATFTGSLSWDYQLSPSGLERPLLVLPMAPSKTRQLARRDLAAATNQLDLLDHVECMQ

SEQ ID NO: 158 - protein, 116 aa, Pseudomonas aeruginosa
MNGTNDYRSTMQQAAAAYLLANANQYLSSGSDRLFDACVNHLAKGLEVPQFMAEQLAQRAWDEVFAGPDPIWLGIDWGQGDDEVVYLIDTRSHCRFPIPARYLPAHLLKQRPQHTQ

SEQ ID NO: 159 - protein, 77 aa, Pseudomonas aeruginosa
MSGHISITVEVDQNQAEKYLLWLVSQYEAAMAECWYDDRYRYTPQGLRGKRILEDRPHIAGICRTIRELRKQIRGRA

SEQ ID NO: 160 - protein, 906 aa, Pseudomonas aeruginosa
MKEMDRELKADVLLRLQDQYGLMPIKGTKYMRKGECPTCGKKELYTLVDSPWFIRCGRGKCGDTWHIKEIYPELFDDWSKRAPATDKEPAASARAYLAHARGFDLTLIDGWYSQENYWARDLEIGSATVRFPLKKGGYWERLIDRPSRFGKKKARFKPGDSPRGVWWCPPSVDLQEVKELWIVEGIFDAIALLHHGIDAVSAMSSNAFPEQSLRELATARGGKLPKLIWALDNEPGAHRYTRRWVTEARTLGYVCEAAQLPQRNNRKFDWNDLHQRWMFIDDAAERAAQIEKDLKTARHEGALLIAESPAEKALLMYDWNSRGEFHFRFGNRLFWFKLDLEKFDRAMRAFENSDDHEDKLLNDRQKRDKALQQSGNVVEIANCFPQALYFQRNEVTDESWYYFRIDRPDDESVKNTFTSAQVAAASEFKKRLLGVAAGAIFTGSGAQLDQIMKLQLTGLKTVATIDYLGYSREHACYVLGDVAVRGGVIEKANAEDFFEFQKLRLKTLQRSIKLQIATDAKDYRPEWLDWLWTCFGAKGLVALAFWFGSLFAEQIRAEFQSFPFLEATGEAGAGKSTLITFLWKLLGRADEEGQDPSKMTKAGLRRWLTQLSNMPMVMLEADRSDNSRAGGAAKSFDWDEFKPLFNGRALGVTGQKTAGNETYEPPFRGTLVMSQNATVQASEAIMTRIVKLHFIRPEITRESQAAADNLNHLGVLEVSHFLLMAIRAEARVLECFRERLKVHSATLRALKQIRIERLILNHAQMMALVDALRLVVPLSEHQLACAQQTLMTMALERQDAVNADAPEVAEFWEVYDYLENLSEEPVLNHSKNPGTIAINLNEFVKLAADHRQKVADAATLRDLLKESRRHKFIEYKAVDSAVRAAHARQNPFTNRPSTVKCWIFQA

SEQ ID NO: 161 - protein, 117 aa, Pseudomonas aeruginosa
MQPLPHDYLQLIHDFQTRQQENEVAGLTALKRLLPIAQRDSSQSGVIGRFLLGLYNGQAHRFDLTELRRLDPALFDACLSVLRMDYAPKQEVHEYFENGDAIWQDLSKRWAAATLAA

SEQ ID NO: 162 - protein, 68 aa, Pseudomonas aeruginosa
MDVIDQANERAENMVQAALAQRTNTRLAPSALWCEDCGEQIPEARRQAAPGCECCISCQELREHPARR

SEQ ID NO: 163 - protein, 561 aa, Pseudomonas aeruginosa
MLKRTLYHFHFCCGLGGGAKGFNRSRPRVGNVEAHWECLGGIDVDAGVLRDFAKLAGVPGTQLDLFTRDQYIRFHGKEPPADWREATPEDIRRAAGGKRPDCVFISSPCKGASGLLSEEKAKTPRYQALNELTLRCIWLMGEAWADDPVPLIAFENVPRLATRGRHLLDQIGQLLGHYGFANAETTHDCGELGGLAQSRKRFLLVARNIEKVPAFLYEPEKKSLRAVGDILGRMPLPGDIEAAGPMHRVPSLQWRTWVRLALVRAGSDWRSLNELAIEDGHLRDLVIVPEYRSGYMGVHGWDDTAGTIAGRSGPTNGAFSVADPRYRQASNWNHGQQFGVIRWAESAPTIPGQTTPGQGTFSVADPRPNWNRHSGNYRVIRYDQPAGTIIAGGKGVQGGQQSVADPRILHRGKGDNYLTGGHYGVIGFNQHSGAIAASSRYDSGRFSVADPRIPAADERLTCIIRSLDGTWHRPFTTLEKAALQSLVEPEEYLVLDGMSDKDWSERIGNAVPPHAAEAIADVMGTTLLLAEQGETFRLSKTPIWVRNVAVALSVSQPAESR

SEQ ID NO: 164 - protein, 62 aa, Pseudomonas aeruginosa
MHELLKMLDNPRSLLNFSLAILAVLAVFFMLKSGAQADSSPVIDTQKTGAIILVSPEGDRAV

SEQ ID NO: 165 - protein, 70 aa, Pseudomonas aeruginosa
MIKQPPGTILTFEDLQQLTGYTKRSGVERALRKQGIRWFWGRHGPWTTIEMVNQAGGQAADDGQYDSRIL

SEQ ID NO: 166 - protein, 382 aa, Pseudomonas aeruginosa
MRRSRKRKHNPHIPQHIDQAAIPAAVFFDHRGNGVWYTLHYDEGGRQRRTNLAPSYVSLSELHRIMEERDGIDRDSLAHLCSEFHKSTQFKRLKPKTQSDYEYCREILLAIPTRLKKPLGELAVRKFSPALVQRLVDRITEEGTPSKAAHVLRYLRRVMQWGRNRGYLEINVAQGIEAPVERKQRRLPAPTVMYRLINRARELGKLKRGQPGACPAYLSSVMELAYLCRLRGIETVTLSDANELPEGVLTNRRKGSRNNVVRWTPRLRAAWNHAKAYRAQVWTSKSIPTPTEPERRPIIVASHGGSLQKSSLDSAWQRFITAALEGGIITPDQRFGLHDLKRRGITDTPGTRADKQEASGHRDESMLDVYDLSVPLVSPSAD

SEQ ID NO: 167 - protein, 73 aa, Pseudomonas aeruginosa
MEKTQVDNRQKLGTETAMGHALKKTDRIYIPPRDKSQVAVARPAEGEYKAQLEKAFCAAFQRYEKALEELAKV

SEQ ID NO: 168 - protein, 168 aa, Pseudomonas aeruginosa
MTGRDLSQFGEICEGIRYLTVDALVWINQQLILSQTPAEMVGVLKPNELESSQQRPAQYRCYAQNQDMYCLASVLMESLVRNHPFANANKRTAAAAGFIFLLMNGYELTAPGHELVTILVGLSTGEYDREDIENWLAHWGRDYDSRNLNAPDAWLEMYAATLNVVAGE

SEQ ID NO: 169 - protein, 439 aa, Pseudomonas aeruginosa
MARTTAPLTDNACRTAKSREREYKLFDGDGLYLLVKPNGRKGWRLRYVKPDGREGLTSLGNYPVVGLADARHKRFELKQQLANGIDPIQSKQQAKVQAVINGRTFESVALDWYAGMVPKWAPGHAKTVLSRLKTHVFPLLGARAIVELDTHDLMQPLEAVTKRGTIDVALRIKNYLQSIMREAKRLRLITANPAHDLDGSIRAPRVTHRPALPLSRLPELQARIDDYKGRPLTRLTVMLSLHVFVRSSELRFARWNEFDLNRGIWEIPDTRPALDGVPFSTRGTKMAGDIHVVPLSPQAVTLLEQIHAITGKFELVFAGDAKPWKPMSENTVNAALRTMGYDTKVDICGHGFRAMACSALVESGLWSETAIERQMSHKERNNVRAAYTHKAEFLEERRMIMTWWSRFLEANREDHVTPHEFAKQTGENVTRLRSAKRTE

SEQ ID NO: 170 - protein, 326 aa, Pseudomonas aeruginosa
MALVGRRDGRNFGYGRQLSYAGPQALKDMFGGGHYGTVKAHCDRWQAFVKWCRSEHGPGINDARQIDRKVLVDYAAYLRDMVRRGELAVSTAQNRLSSVNRTMAALRGDQYVRLPSPSKALGMQRSGVRHSVPQGQDREQVDEMVNALCRNNQQRAAAIVLLARATGMRLREAILADLPRLSREANDLGKINIQDGTKGGRAGASAPRWIAVDDHIRDALGFASQASPAGSRNLIAPNESYLNLLQESIRSARDILHAHNLKGFHELRAAYACERYEQITLHPAPINSGQCCQVDRNLDREARWQISCELGHGRIDVVAAYIGGQA

SEQ ID NO: 171 - protein, 488 aa, Pseudomonas aeruginosa
MSYTNPRHEGRLILIPNLQDAFAILHVSEAPRGSIESALEGAESNLLYKCDEVGSGNDRALFNFPFLFSANGNPWHEANDYLLSLMRDRAPASRRTDDVRRRASKLLDYLLFCEDNNLDWLDFSGARPSLRPTYKYFYHLIKEGRRSNQVINQYTAAVYHFYKYVSEHWHYLDLKRVDTIKQVRLIVQSPKGAKIIDAEKRSQTRRTPPSSSVPLGFVREDGEDLRPLSNLELGALLEAINEKKWSTIERLILLTSLMTGARKQSVLTIRLKHLKGFTEDKLVPECAYKLHAGPRTGIDTKFDKTQVLYVPKQLAEELVTLARSPMMRRRREKFRAQLEVSHPGLLIEEDDMYLFLSDQGNCYYMASNDPRYAIVRSPQTGQVTETIKRKLQSTASSQFPKDFTYHWLRATFAYQLYQRLQPLVQEGVLKLGEDIDFIQKRMHHESRETTENYLKLFNMTHEKVIAQEVWEKKLFNGNYEVMKLTVQE

SEQ ID NO: 172 - protein, 608 aa, Pseudomonas aeruginosa
MVFGDYGHDQQALIEEAKYLLYCLIYFAGGGRIGKLSASTIISYWVVLRIAMKFCYAQKKKSMVGVLSLQQLFTVPVYLAAFVSESNFDKTVLSGILHGLISVGEERLGYVVLNPRVFDLRRPDSKQHPVIPTRLYLNLINICGDLLDHLYLGVGNIDSFISCFADEYFGLTPHRQKSLGVGGKSRYRPGIQQAIEEYGLAAVFVGEFACSEKRKLQRVLLKMQYVVRMVIHLYTGMRDQEVMRMSYNCLSDQVVRCSVVDDQGFMRDQPQSVHILSTTTKFSGYKKESAWFAAGEVVKAVEVGQAICRGLARLYRIELDDRCPLFINPSVLCKTKNCAEVGVTDFTLRATMGSALKSLSIQSEDLQELAQSDPSRDFYNEPDFAVGQPWPLTSHQFRRSLAFYGSSSGFLSLPTLRAQFKHMTIQMARYYANGFDNLRTIFGYYDEKKIDFVLPYNHFAFEFQMAMPMSVANQLIADLLFKEEPLFGGTGSYMQRQKERVEAGEIKIEDIRADTELRVKNGAISYRPTLLGGCTKVGRCDSFMLGDYTECLSCEGAIIKPSRLSAAIEDAKNELSNYAEDSGEYQIVKGDIERLMVFKTRLIDTVEL

SEQ ID NO: 173 - protein, 73 aa, Pseudomonas aeruginosa
MDKLAKALGERIRVQRKACRISQDALALACNIDRSYVGRIERGEVNITVEKLYRIASVLACDPCGLLPQASEL

SEQ ID NO: 174 - protein, 192 aa, Pseudomonas aeruginosa
MKSASFIFDRRLYELLQEPGRTTFTTRELRDAYAARLNGTHFRIADVRRYVYEQIRRLVRAGWVALDEDRRVRGQVYHLQPIPAHLQLELIDNGFESSLMAAGVPEPDTAVRDVEALPANTDLQLEALHKEIRLDFLTSMGEAERFKLLLDEMPHLRDKVEGDYLEARDRSSRLLGHLRAIEKTLKTLAAPR

SEQ ID NO: 175 - protein, 466 aa, Pseudomonas aeruginosa
MSRSLRSWQNSCITKALEHLTVTQHFFCQATPGAGKTRMAAELTSRLLQQDRIDLVLCFAPSCQVVEGFRSTFSEVLGRRLDGQMGAVGAAYTYQAMEYRDEGFWQLLDDYRVLVVFDEIHHCAGHDPLLSNAWGQQILHRIQDRAVFTLALSGTPWRSDDKAIALARYSSPEGHLICDYRYGLKDAIADGVCRSPRIVLLDNQKVKLTEELGADSSVRLFPSIAKLLGESPVTYEELLRHDDVINPILDLGYSKLNELRQIKPDAAGLVVATDIEHAQQIAQALETMGEECRIVTNKTPDAQQVINAFRSNTCRWIVAVGMISEGTDIPRLQVCCYLSRIRTELHYRQVLGRVLRRTGESDDQAWLFMLAEPKLQGFAERIADDLPDDLAVLRDVQMPGFNPDSRPEPMGASGHVKGIGDAGLGGAEPGIGSQATNIISLGGFANEPAYQVSFSQHYRQQLLACF

SEQ ID NO: 176 - protein, 100 aa, Pseudomonas aeruginosa
MEVRSQALVDVVEDVICDVCRSGTRIPGYGLQYGKLEAQWGYGSQHDGKHYRVHLCEPCFFRVLSGLRRECMVNGMFDDEQPFSSEDFGLVSKGNYWEKS

SEQ ID NO: 177 - protein, 50 aa, Pseudomonas aeruginosa
MGGLIARSPFLLRQNRKKDVLQSLSQKYLDFNIDVCLKATAPWAVWSIKL

SEQ ID NO: 178 - protein, 111 aa, Pseudomonas aeruginosa
MIRIDSIWLATEPMDMRAGTETALARVVEVFGAAKPHCAYLFANRRANRMKVLVHDGVGIWLAARRLNQGKFHWPGIHRGSEVELDTEQLQALVLGLPWQRVGAAGAITVL

SEQ ID NO: 179 - protein, 126 aa, Pseudomonas aeruginosa
MKQMTFADAEYAGKRKQTRKELFLIEMDRVVPWKGLIALIEPHYPKGEGGRPAYPLMAMLRVHLLQNWFGYSDPAMEEALYETTILRQFAGLNLERIPDETTRCQLVEIGRGSHAADCARAGDQRR

SEQ ID NO: 180 - protein, 289 aa, Pseudomonas aeruginosa
MLNPVWLKSLVAIVQTGSFQSAARALGLAQPTVSQHLQKLEEQVGVTLVQRSRSGCQPTTRALAFMPHATALLDMHARALEALHGNRERVGASSNIGTYLLLPFVRNYLTTANERGEVDLRIAANPDVADQLLAGQLDAAIMEWWLPHPDFEHRLWRVEPLVLIVSPDHALAEAGCIERDRLVDLPMLGGEPGSGTGRLLTEYFGELGVPRSGMQLGSTEAVKQAVRAGLGVSLVMASAVQDEVRSGALVALPIPGLEKRLQLIWRKPPGNLHPPGFVRHLLEEADLAG

SEQ ID NO: 181 - protein, 336 aa, Pseudomonas aeruginosa
MLPKLVITHRVHDEILQLLAPHCELMTNQTDSTLPREEILRRCRDAQAMMAFMPDRVDADFLQACPELRVVGCALKGFDNFDVDACTARGVWLTFVPDLLTVPTAELAIGLAVGLGRHLRAADAFVRSGKFQGWQPQFYGTGLDNATVGILGMGAIGLAMADRLQGWGATLQYHEAKALDTQTEQRLGLRRVACSELFASSDFILLALPLNADTQHLVNAELLALVRPGALLVNPCRGSVVDEAAVLAALERGQLGGYAADVFEMEDWARADRPRLIDPALLAHPNTLFTPHIGSAVRAVRLEIERCAAQNIIQALAGARPINAANRLPKAEPAAC

SEQ ID NO: 182 - protein, 275 aa, Pseudomonas aeruginosa
MSTHYDVQALPAEQREHILRGFGLGWWRQLGQVAIVFGVVLLACWYVGLLDATTLLNGLPSIATLAGEAMPPDFSGYRSWIRPLIDTLAMSIAGTAIAVVFSLVVAFVAARNTAPHPLVFGVARVLLNALRSVPELIMGIIFVAAVGFGALPGVLALGLHSVGMVGKFFAEAIEHVDEAPVEAARAAGATPMQVLLHAVLPQVTPQFADVAIYRWEYNFRASTVMGMVGAGGIGFELMGSLRIMQYQEVAAILLVILAMVTLVDAFSGVLRKRFK

SEQ ID NO: 183 - protein, 287 aa, Pseudomonas aeruginosa
MKRLSALLLTCLLSAVSSLSALAADADPDVLKVALLPDENASELIKRNQPLKDYLEEHLDKKVQLIVTTDYSSMIEAMRFGRIDLAYFGPLSYVMAKSKSDIEPFAAMVIDGKPTYRSVIIANVASGVNEYADLKGKKMAYGDRASTSSHLIPKAVLLETAGLTGGQDYEQHFVGTHDAVAVNVANGNADAGGLSEVIFNHAVERGLIDPSKVKVLGYSGEYPQYPWAMRSNLSPELKTKVRDVFVGIDDPEVLRNFKAEAFAPITDADYDVIRNMGSLLGLDFATM

SEQ ID NO: 184 - protein, 275 aa, Pseudomonas aeruginosa
MTPHPIQDAVLRVDRLSVVYPGGVTALRDTSIAFRRGEFTVLLGLSGAGKSTLLRSLNRLVTPTGGSVTSELGELGSGSALRQHRRRTAMIFQHHQLIERQSALANVLTGRLAFHNTLRSLFPLPRADQEIALSCLARVGLADKALSRVDKLSGGQQQRVGIARALAQQPAIILADEPVASLDPATSVRVLGLLRDICKEDGITAIVSLHQLEYARRFADRVVGLADSQIVFDAAPSELTDAQLERIYAGRSTTQPANAPAEPPVMLEPSLEMSR

SEQ ID NO: 185 - protein, 213 aa, Pseudomonas aeruginosa
MKQMTFADAEYAGKRKQTRKELFLIEMDRVVPWKGLIALIEPHYPKGEGGRPAYPLMAMLRVHLLQNWFGYSDPAMEEALYETTILRQFAGLNLERIPDETTILNFRRLLEKHELAAGILAVINGSGRPRPVAAPGHHRRCNADQCAQFDQEQGRQARPGNAPDQEGKPVLCVTNTGQMTCAAVPKMEVGLPKSACRSGLQTTRCCCIQKVWW

SEQ ID NO: 186 - protein, 422 aa, Pseudomonas aeruginosa
MSGVSSAKPYDIAKRTVWDAYQQVRANRGAAGIDDETIADFERDLSKNLYKLWNRMSSGSYFPPPVKQVEIPKASGGTRKLGVPTVGDRVAQTVVKLLIEPELDSIFHSDSYGYRPGRSAKQAVAITRERCWRYDWVVEFDIKAAFDQINHGLLMKAVRLHIKEDWILLYIERWLVAPFETDDGMRVPRERGTPQGGVLSPLLMNLFMHYAFDTWMQRTSPNCPFARYADDAVVHCRSRKQAEYVMRSIASRLAACGLTMHPEKSKVVYCKDSNRRAGYPHVSFTFLGFTFRPRKALSKQDQLFTSFLPGASADALKRMRQAVRRWRLNRQTHVTLVDVARLYNPVIQGWWQYYGSFYRTAMLGIFQHIDRALERWARRKYKALHRRKRRISQWLDKMRTVVPRLFHHWRVTGQQGWITGAV

SEQ ID NO: 187 - protein, 57 aa, Pseudomonas aeruginosa
MKTSNRVVIEVDPAQKQQIYAALKARGLTMREWFLQQVSQELSIPQPTPPSSQSSND

SEQ ID NO: 188 - protein, 514 aa, Pseudomonas aeruginosa
MSKSWNHDRAAKHIDQKIADVEEITIKDYVRDMSLESIPTSTAYRVDGVHMYADIMNLEDMLNITAVEGTECHKRTLRFLDQHYRAVKRILNKVDARRVDFHSQRLHSLFTKPYNTESGAETKRVQRAVATAQLIIDVLAETGDDDEQIPAAKVRIGIDTGLALAVNNGRSGYREPLFLGDPANHAAKLASNNKARGIYLTNNARKAIGLAESDEPEKSALTAIEIKACQDAAKLDVTSDEIVEEWREDLKKNPIGGYQFSRQTPPLRDMDIYSLTPANSKRQEMVSLYADIDGFTAYVADHINEKTDDVVRTLHVIRSELERVVTSDFEGRRVRFIGDCVQALSCDGTAHTTDEEKSVSEATRLAGALRSSFNLAIERLNAEGIETGDLGLAIGFDLGPIAVTRLGAKGNRVRCAIGRSVIESEKRQCACSGVETAIGQVAYDAASKAVQNLFGKSRKTSHLDYNEATEALADDGDASAKQARSEAYAGSAAIIRADERQVQPHSRQKVDGSR

SEQ ID NO: 189 - protein, 312 aa, Pseudomonas aeruginosa
MLTIMTTGKLIDRFEGPSGRAVLEEVLLEQKLVLGNQDLARRLAEVGTLEEIAKDAVLITEDAEDSEVYFIITGHFQVKVHDREVATRGGGDHVGEMAALVPTAKRSATVLATEPSIVLKVSAADFKSIADAYPSVWRQVTRQLVDRLHQRNDMVLPAHQSSHVFIICSVEALPIARAIENNLEHDKFFVKTWTQGVFRASQYALESLEEQLDECDFAIAIAQPDDSVTMREETKNTPRDNVIFELGLFVGRLGRARTFLLEPRGDEVHLPSDLKGLTTIGYRLTKSEDQLPSSLSPACNQLRTIFNKLGPK

SEQ ID NO: 190 - protein, 373 aa, Pseudomonas aeruginosa
MMMATIVKTPSGTWKAVIRKQGWPTASKTFRTKRDADDWARSTEDEMVRGVYLRRSPSEKTTLEKALGRYLEEVTPTKKASTQKAEQTKAAPLIRHLGKYSLAALSADVIAEYRDKRLKETVRTKYKEGSDVTPRTVSANTVRLELALLSNLFTVAIQEWRIGLPQNPVLNIRKPSPGEGRDRRLNPDEERKLFQAVNAYHNPMLGWIVRIAVETGMRSSEITSLRRHQVDLKKRVVKLLDTKNGESRTVPLTQAAAQAFKDALENPIRPIDTNLIFFGEPGKDEKRRPYVFSKVWNEMKKRLGMTDLRFHDLRHEAVSRLVESGQLTDQQVAAISGHKSMQMLKRYTHLRAEDLVTALDNIDQSRQGSRPSA

SEQ ID NO: 191 - protein, 692 aa, Pseudomonas aeruginosa
MGQIKSDVLSGVLARRPADRALLTPFLNGFDVTWGASHRSFGTDVTVYFLLPESFISQGFGIDQEIALFVTDFPTLEPRVLQAVDQTLREAPAKGRVEQSIFFLSSPADNGRQWMADYTAANPDSRLAVVFNSKSLVGAAGNAWYVRNQIGEQLFTRNLFDNQLPIDSDLFFFGRDQLVAGFLDAIKRSQNRGLFGLRKTGKTSVLYKIQRIVSRDGIGNVYYYDAKLPSIRSLKWHELLAKISRDIAQANGLSIPEGVDDPRRVSDVLMHILRLTPSDKIAVLIFDEIEFISPVAKDDVHWHKEFIPFWQTLWAIQSQVRRLSNIVVGVNPKVVEMDTVDEVQNPMFGIIQPTYLKGFALDELKNMLKFFGKRMGIVFDADAQTYLLQRYGGHPLLVRMACSEVHKSLERAVVQRPATISASDLVKGEVQRDEELLFYCRHVVSELQRFYADEYKMLEMLASGQIADVRELSDEPEYTRHLREYGLLKFDTHNRPSFEIPVVGEYVGRELARREKRQLVRKIVSEGDRIDWVKRRTQTVSREIRTLAREIDKAGLPKLFGDGDFPEAERFSAILPATDVDTFVVFINICNRCFVESIERYGNKAGIKGYFWSSIKTTYPDLWHALQRIKVYRNNDLHLELNVTVEAELKRYLDIDLEGRTVSQVREPWFALQQAVLDELMLCIQYELARHS

SEQ ID NO: 192 - protein, 130 aa, Pseudomonas aeruginosa
MMEPVTSISSALITLVSAPLTQAAPETLIEVALFVWYDPNPLPSLKRTLEILEGIQQRRARFILDVIRRYPCIELERQQALCELADLKVSFQGGPLTDLLRAWGLDEADIPNTKAILPYQTRHYAAERRK

SEQ ID NO: 193 - protein, 220 aa, Pseudomonas aeruginosa
MNTQDEILSYLRKRIPRNHFEEIKNVVPVAFKKAHDAGSDLVHIPKDRKRAQDRYAYIQDGLAGLQKTWSSQVVPTNPKGEFYTLMNAENIRLTAAIKPWKKKLRPAKYRLNNSKLNRFLMSPQLELLGAGDITVDIENILNAIVIPLSPPWHLDQSKPLDIILAVPYFNSCSDYHVWCSLDKFIEGYEKEIAGDLDLAWPVIRKQMRRDEGLDESTGEE

SEQ ID NO: 194 - protein, 400 aa, Pseudomonas aeruginosa
MRTGILGFQSERLKQLRSASGLTQEGLAELIGCSAGNISKWETGSSYPTAPSFHKICEFFGVSESWLLEKPIKSGFLRPSFFRSQVTTPKISWDVADARLDWLEEISYKLQESLEFPPINIPAYNGNNVREISDEDIESLADECRKTWRLGDGPIQNVIQVLENFGAVTARCTLGFLKMDGVSRWSEVDNRPYVLIAGDKASPIRNRFDAAHELGHLVLHRGVGFDQARVDYHLLENQAHRFASAFLMPSESFPLEVKWPTLDGFLALKKRWKVSIAAMIKRCHDLNVVDDEAVVRLWKGRSARGWVKKEPLDEEFSFEQPKLISRSVKMIIENDILTKNQLKEILGVPSEKLEELCALEKGYFQSNDEQKIIDIRIRANSPRETHARSTSGVVLGFPKK

SEQ ID NO: 195 - protein, 96 aa, Pseudomonas aeruginosa
MLINERCPEDSTETCSFCGENTAKALWMGKSDIFVCSHCAIEHLPQLMADAIVGSISIEQLQASTGPTCEINKELRIRERFHSAFSSALIRKIRTT

SEQ ID NO: 196 - protein, 365 aa, Pseudomonas aeruginosa
MPFQPTSSSDLGHWKSAMKTQEEIFELVRTARQRMKELPSKRLTKSTDDGYVREYNRMVGDEGANPEKLWSAICATQSKSTYRRRVAATMHCCRAQLQEALRCQDAAQRVGDMSALRYQVAAIEEVIGILNIVERHKGQCPLENTVRRKSKRSDLKYLPGNWRDQLHKQLEGSKYELAFLAEAVSGCRPGELEKGVKVICSKESGLLTVRIDNGIKVTDEKGQPWREITYRVDQNPLVRALFENCRNAASGAEKIETVVDIEKTTNWRAALSSAGQKLWPRLKFRICPYHLRNAVASDWKRAGLSEEEISAALGHCVNKTSSNYGQFQIGQGAGGLSPVEVRAARPVLNTRTLSPQVNRVSLSPK

SEQ ID NO: 197 - protein, 751 aa, Pseudomonas aeruginosa
MRKSLLLCLFLAAFLGGAAHADSSGGLNQFTPPPGDTSVDFLEEVFGSIVGTIHSGGNVEGGETEDVLGSMMSVFGGAVMFLGMIFIAYTTIKGTVDSAQDGEVLGRKMSDIWIPLRTAAGGALLLPLGHGYSLIQIMVLWLAIQGVGVGDAIWSQAVDQIGKDGMLSRPLIPDSRPLAANILKFEVCTAAMNKQFEASGRSTRIQAVASARKVVNTGEIDVDITDAIPVYGGINMVQKYNKASYTVTDYKWKANDNSYINPDVCGALTWKQSWEASEGNSNTKVIKEPILAAHAKAIQQMIQDIRPTAQQIVAGQKPAPGVIDAAANTYENSLRSAAKTAVMQTSDRAAADFLKAAKDGGWLFAGTWYNHIVKMNDVMQSTLNGLPAAEPIAIVDKETKETLQTYADVMLTTDEYAKHRVDSVRNTYYAETNVREPRDGEGAWEYVKKMMSAPFMGAINQMTQSIAGSNLNHMSQMKSFGDVIVTTGEVMLAAMASATGVANSWAAQATVKVGFDVGAVFQFLSTLITTLLILLFALGVTLSTYVPMIPFITWTTAIVNWFVLVLESVIAAPLFAVAHIHPDGDNAVGRAGQGYMMILSLVMRPALMLFGLLGGMLLTQPIVGYINAAFMSVVSGIQADSMTGIVSFIAYVAIYVVMMTTVVHIVFSLIHWVPDNILRWIGNGSTGGIADAERTGDSGQDVFVAGVRETKHGAAGGLGGGAKHSKGPDNSTPGRSMPDNNTLLGGPPPGG

SEQ ID NO: 198 - protein, 150 aa, Pseudomonas aeruginosa
MGSWFKIYFSVAVKAFYEVAFVLLPVAVWMVVIFSVGGTREEIKSLVAWPFAGLALFGASLRDGISAFHQDTPFDKRQREIIIAGSLIGVVLCTVLMTLGVLKARGDLSYLFPAFREMVFILLLSGITLLLVVKAILAQRKDFGIYKGQL

SEQ ID NO: 199 - protein, 87 aa, Pseudomonas aeruginosa; identical to SEQ ID NO: 16

SEQ ID NO: 200 - protein, 280 aa, Pseudomonas aeruginosa
MQARTGISERRACQLIGLSRSVLRYQPRASVQNTELQAQLVELAQERRRFGYRRLHILLRRAGVQVNHKRIYRLYRAAGLMVKRRRRRHGVAVERERLSLPSAPNQVWSMDFVFDALSTGRRIKCLTVVDDFTKESVGILVEHGISGFRVTRALDEMARFRGYPKAIRTDQGPEFTGKALDQWAYQRDIKLKLIQPGKPTQNAFIESFNGKFRDECLNEHWFCSLAEARIRIAAWRRDYNEHRPHSAIGNLTPAEFAASWRTRQQQLKQEKLISTPGPTN

SEQ ID NO: 201 - protein, 539 aa, Pseudomonas aeruginosa
MYLKLGRTICRGPDAFPSFAASGGHGLPSPDCHYRKLLMRPRRPLRTKTSSFGKPSATTSAVVEHVDLSSYLSYALLILYVLASVSSTKDEMLLIPSRGIQLPLVSVTVPVVGFYLLSPLIVLIGHLVTLRRIPMTFPKLLNTEPHARHEQLNVSTDYLMVICLLFAGPATLLLITCRFAAYQSPVVFLIQAAALVYACYATLVRFHEVLPEKVRTAQTPVKWACYLAGTVVGSWLLLCADVILIPAQYSATVWLKTHTALLDNEDEGTIAWIPHIHIDRADRLWSGVATTDADLAEHSGKVDAKELFMTRGVALDLRSRNLRFLDISQQVIPRVWAHDADLSGANLSFTRLYGSVFVGTKLNGASFDLAALDGSTFMHTTISNTTFRHARLKGSYWDNVVVNDSDFLQADLSLASLYGVKFNRVVMAGTDLTATSLFETEAADLAIGYVEPYKILTAVESDELMKETSPVLEVAPEAALAEIAKQICRPNIDSGWTYAWSNFLQIKSMVGASEPGVMSALQGLFKLERCKDLPDRGFE

SEQ ID NO: 202 - protein, 2223 aa, Pseudomonas aeruginosa
MVGDATAAGWRSANFRVYSGDYNGDGQPDLYLKAVTSVVVVGGEVATPIPLLPPLKNVVLLRNGASYSALYDPPAADLNAVAWTAAPYQSFIGDLNRDGILDLILQPNDSSDSLLIVSGNPSAHGVLQVASGTGLGTEIGYDAGARFALGDWLGNGGTSIRVSHPTQGQSTLFIDAGGQLVARYLSVPTPLPGVVLGKAAEAFTALNLLAPQAGVRGDGGVDYRYPLELPPGIAGLQPELALVQGGGGGVLGEGWSLAGLSSIERCPASIAQDGQNRQVGLLESDRLCLDGMRLQLLSGEYFKPGSVYRTEIDSFSRVQATGSAASLGFEVRTRDGRILTYDGAAAIKAQGAAVPYQWGISSATDRFGNTIEYRYLAANSLVPSEILYAGNRVSFEYAGALRSVPRYFAGGYTSATHVLTAVAVRGPAAQQLFRTELAYERTQGDASKVRLKQVQRCAWGSAGKECLSPVAFDYLAGVYGYTGTAESAGLDKFDYVLISQASFVTADLNGDGRHALVNATMGKLKAVSYDGGSLVERLLYDADNTPLFSLTRMDFNGDGKDEILFLRMRKDPNSANADMQWMLYTANGVVALGDTWTAPPAGPNGIVYSLAGGSTGFATYAPLVADLDQNGSLDLFLPINGSWVAYLNRSGAIPSFARSALLSGFKTIDYGWFSYWGSDPGGGVRLASGKAGKLSAGIWRSGSGMAPAAMVDLGIELARALTADVNGDGQMDYLVPNASGKVDLLLNTGGPLSAGLFQRLGTSLSAAQLLPEYRFRASLQDYAAKAVDYDGDGREEILYPRASGTFGLLRFTGNGFEELDSGVPLSRRLATSTTQLDKSCQDALAVWKRIMDTAPDAAGRESASWLYYQTAANCGFSPEGLLVDPYEMFVADVNGDGFQDVLVGGSLVVEPLRRSIRWRAFLHNRRSPELLSRIDAGSGNSLGIEYARLNDPAVHTPQVSAFPQVSLNIPRPVVSRLRVADGIGGTRDYQYLYQGARLDLLGRGFLGFRQMEVRDLARGRTQVRMLRQDFPFVGRLDKEETSLAGKLLARQQNQWKSAATIAGKSFFVYPAQFNEERFDQGAPVSATRRKVVMDESYGNPTQVTEEIAASLTGGTLHSRVVERQYSNDGASWLVGFVTRETESTSGDSDSKSRVQLRSAQPGTLAPASETSFSGSPGAEITRQYSYDGNGRIVRITTSGAGLAARSEQFGAYQGPWPGTRSNALGHVERFAYEAARGQPTSKVDANGLAESYLYDAFGRETLRRFADGSLLATDYLVCGSRAICASGAKVAVRTRTVRGSQQGAVERWQYLDGFGRVLRDRRQAFDGRWINVDNSYDALGRQRSTTEPYIEAATVLQTTWDAQDRPLARQLPSGAQLSYSYGARAAGGSWKQYSLGYDGRSLTERREYDARGKLVLSTNALGSAGEVSVRYRYDADGNLAWTQVAGDSRSEIRMSYDAAGRRTGLFDPNSGQESVQYDALGQALVRTASDGSRTERKYDLLGRVLEQTDRLGGQASISRWQYDTGTKSLGKLVGVAGPGYRQALLYDDLARLKARGWDIEVDGVTRSYQESYGYDGFSRLASTTLGNGQVLRHLYNGYGFAAGEQDGAGTTLRQIQARDARDQIVRESYGNGVLSQRDYQPATGWLTRIQASKGGSVLQSLSYRYDGLGNLLERSDARGYSEVLSYDDLNRLLRSARTLDGTQVVQDFTYDALGNLTGKSGVGAYRYGSYSSAEQQLCAGRGGVAQPGPHAVRGTSAGTYCYDARGNQLSGPGRQVKYASFDKPVEISAGSSLSRFSYDPERKRYLQTVDGRTSVYLDEGRFEEVNDGGRSWQDAYVGDYLILRKEGGAVKKLYLLRDALGSVEILLDANGAVSERQSFAAFGEHRGADWKDNGNQPTATSTRRGFTGHEHLEESGLVHMNGRVYDPVIGRFLSADIVYQDTANAQAYNRYSYGWNNPIASVDPTGYALEEISSGNSWYSPFISNSWLVLGNAFKGNLPDSYWDLGVGAFKQNLNFAATTLAGNPFSIYGFSRVSESFDNLLSPKGVDQRAGAGVYELGSLFFPTAGDKVSGWVAGFASRLRFAPALRGGIGVSSPAWKGSGPTPGVLGVEPGSLSSKSLRNYYPSTDSGSIEYVFDPISKSFAVGRPKDFRPMLSQHQQLADSIGAADATVVGGKFWRGPNGEFFTNEYSGHYWRNWSEENRKVFVDVMNKYGVKVEHRRGM

SEQ ID NO: 203 - protein, 818 aa, Pseudomonas aeruginosa
MRIPPYFPRLGALALACALALPAQAAERAWSYSYNALGLIERADGPRTDVQDVTLYAYDSRGNLTQVTNALGQVTRLGDYDERGKPGSITDANGVTSSLAYTGVDGWLASVSTAGSTTRFDYDAVGQITRVTRGDGSWLSYEYDDARRLVAIGNNLGERLEYDVDTKGNRTAQRIKDASGSLVRQQQWAYDELGRLLRAVGAGGQTRSFAYDLNDNPVGETNPRQFAHSQAFDALDRLVGQSDPLGGKTRLAYDAQDNLTEVKDPRGVTTRYEYDGLGNLTRLVSPDSGTTTFEHDAAGNVIRRTDARGAVTEYRYDALNRLVERRSPSDPSLDVQYRYDLTADGNQGIGRLGAIEGARDSLVYRYDERGNLVEQVRSIRLDQQTLLDRVTYRYDAANQLLEIGYPSGLAIGYPRNAGGQVASVTLAVGDKAPSTLVGQIAYLPFGPLLRLTWGNGITLSREYDQDYQLLRQKVGPWQSDYQHDANGNIQQHRHSLWGTLDYQYDPLDRLTEERGVQGGRSYAYDAVGNRTQRSDNPASGGTASSQDYQYAPDSNRLTAIGAQAVTSNAAGNLTQDRAARKLAYDAQGRLQSVSLDGQQVAEYRYNALGQRIVKLTPESVTTYLYGPDGQLLGEAEHDGSGRKLRAQYYLWLDSLPLATIDADYDAQGKVGNPTLLYLHGDHLDTPRLATDASGQIAWQWQSDAFGRGEALSQGSTQVNLRFPGQYYDAESGLHYNYFRDYDPETGRYVESDPIGLEGGINTYGYVNANPINQTDWRGTVPDQICLAACITVGTVTGGYVGTVVGGLAGGQEVRWYCL

SEQ ID NO: 204 - DNA, 19 bp, Artificial
  Primer used for screening the fosmid library of PSE9 genomic DNA
aaattggccgaatacgctt

SEQ ID NO: 205 - DNA, 21 bp, Artificial
  Primer used in screening the fosmid library of PSE9 genomic DNA
tattgcttgctgaataccggg

SEQ ID NO: 206 - DNA, 20 bp, Artificial
  Primer used in screening the fosmid library of PSE9 genomic DNA
tctccaatcttgagttgggc

SEQ ID NO: 207 - DNA, 21 bp, Artificial
  Primer used in screening the fosmid library of PSE9 genomic DNA
ttctatcaacagaccgggatg

SEQ ID NO: 208 - DNA, 19 bp, Artificial
  Primer used in screening the fosmid library of PSE9 genomic DNA
cagctggacaaatttatcg

SEQ ID NO: 209 - DNA, 21 bp, Artificial
  Primer used in screening the fosmid library of PSE9 genomic DNA
aaatcctaccccacggtgtaa

SEQ ID NO: 210 - DNA, 21 bp, Artificial
  Primer used in screening the fosmid library of PSE9 genomic DNA
acgcaagtagggtcgtgaaat

SEQ ID NO: 211 - DNA, 20 bp, Artificial
  Primer used in screening the fosmid library of PSE9 genomic DNA
tactttttgaaccgtcgagc

SEQ ID NO: 212 - DNA, 21 bp, Artificial
  Primer used in screening the fosmid library of PSE9 genomic DNA
actttttgaaccgtcgaggtg

SEQ ID NO: 213 - DNA, 21 bp, Artificial
  Primer used in screening the fosmid library of PSE9 genomic DNA
aaccaggagttaacacgcaag

SEQ ID NO: 214 - DNA, 19 bp, Artificial
  Primer used in screening the fosmid library of PSE9 genomic DNA
aggcggtagtcatgcgatg

SEQ ID NO: 215 - DNA, 20 bp, Artificial
  Primer used in screening the fosmid library of PSE9 genomic DNA
tatcgcggggtgaatttttc

SEQ ID NO: 216 - DNA, 21 bp, Artificial
  Primer used in screening the fosmid library of PSE9 genomic DNA
gcagcctggacaaatttatcg

SEQ ID NO: 217 - DNA, 21 bp, Artificial
  Primer used in screening the fosmid library of PSE9 genomic DNA
accatcgagatacaccatcca

SEQ ID NO: 218 - DNA, 20 bp, Artificial
  Primer used in screening the fosmid library of PSE9 genomic DNA
ataaaggatctgccccaacg

SEQ ID NO: 219 - DNA, 20 bp, Artificial
  Primer used in screening the fosmid library of PSE9 genomic DNA
ttaatcgagttgctgaaggc

SEQ ID NO: 220 - DNA, 21 bp, Artificial
  Primer used in screening the fosmid library of PSE9 genomic DNA
catttaaagaggcgatcgatg

SEQ ID NO: 221 - DNA, 21 bp, Artificial
  Primer used in screening the fosmid library of PSE9 genomic DNA
aatccgacctactgcctgaac

SEQ ID NO: 222 - DNA, 21 bp, Artificial
  Primer used in screening the fosmid library of PSE9 genomic DNA
tgatggatcgattgtattggg

SEQ ID NO: 223 - DNA, 20 bp, Artificial
  Primer used in screening the fosmid library of PSE9 genomic DNA
gccctcaagatcggtaaaat

SEQ ID NO: 224 - DNA, 21 bp, Artificial
  Primer used in screening the fosmid library of PSE9 genomic DNA
attgagagtggcagaggttga

SEQ ID NO: 225 - DNA, 18 bp, Artificial
  Primer used in screening the fosmid library of PSE9 genomic DNA
atggcccctctttcggtt

SEQ ID NO: 226 - DNA, 20 bp, Artificial
  Primer used in screening the fosmid library of PSE9 genomic DNA
catttattcgctgtgggacg

SEQ ID NO: 227 - DNA, 20 bp, Artificial
  Primer used in screening the fosmid library of PSE9 genomic DNA
aatgttaggacctccttgcg

SEQ ID NO: 228 - DNA, 22 bp, Artificial
  Primer used in screening the fosmid library of PSE9 genomic DNA
cagatggaaggaatctcggtca

SEQ ID NO: 229 - DNA, 20 bp, Artificial
  Primer used in screening the fosmid library of PSE9 genomic DNA
cgggcaggtacataataacg

SEQ ID NO: 230 - DNA, 21 bp, Artificial
  Primer used in screening the fosmid library of PSE9 genomic DNA
agtttgaacacaggaaaagcg

SEQ ID NO: 231 - DNA, 21 bp, Artificial
  Primer used in screening the fosmid library of PSE9 genomic DNA
gcctaaaaggactaccgtcag

SEQ ID NO: 232 - DNA, 21 bp, Artificial
  Primer used in screening the fosmid library of PSE9 genomic DNA
gaacagctcgattctcatgct

SEQ ID NO: 233 - DNA, 20 bp, Artificial
  Primer used in screening the fosmid library of PSE9 genomic DNA
aatcttgtccgttcgcaaca

SEQ ID NO: 234 - DNA, 21 bp, Artificial
  Primer used in screening the fosmid library of PSE9 genomic DNA
ttcccaactgcaggaggtaaa

SEQ ID NO: 235 - DNA, 20 bp, Artificial
  Primer used in screening the fosmid library of PSE9 genomic DNA
aaaatcagccatcacatccc

SEQ ID NO: 236 - DNA, 21 bp, Artificial
  Primer used in screening the fosmid library of PSE9 genomic DNA
ttgcagaatcttacctgcagc

SEQ ID NO: 237 - DNA, 21 bp, Artificial
  Primer used in screening the fosmid library of PSE9 genomic DNA
aaaacaccagcaggactacga

SEQ ID NO: 238 - DNA, 20 bp, Artificial
  Primer used in screening the fosmid library of PSE9 genomic DNA
atggagttcaaatgcatcgg

SEQ ID NO: 239 - DNA, 21 bp, Artificial
  Primer used in screening the fosmid library of PSE9 genomic DNA
aataatctgccccctctttcc

SEQ ID NO: 240 - DNA, 21 bp, Artificial
  Primer used in screening the fosmid library of PSE9 genomic DNA
gccgcgggattatgttatatg

SEQ ID NO: 241 - DNA, 21 bp, Artificial
  Primer used in screening the fosmid library of PSE9 genomic DNA
tataaaggatctgccccaacg

SEQ ID NO: 242 - DNA, 21 bp, Artificial
  Primer used in screening the fosmid library of PSE9 genomic DNA
gatataccccctatctgagcg

SEQ ID NO: 243 - DNA, 20 bp, Artificial
  Primer used in screening the fosmid library of PSE9 genomic DNA
tgtggaattgtgagcggata

SEQ ID NO: 244 - DNA, 19 bp, Artificial
  Primer used in screening the fosmid library of PSE9 genomic DNA
acttgtagaccaggtgcgg

SEQ ID NO: 245 - DNA, 20 bp, Artificial
  Primer used in screening the fosmid library of PSE9 genomic DNA
tggatcatcactgaggcaga

SEQ ID NO: 246 - DNA, 20 bp, Artificial
  Primer used in screening the fosmid library of PSE9 genomic DNA
cgcgactataaccgggccat

SEQ ID NO: 247 - DNA, 20 bp, Artificial
  Primer used in screening the fosmid library of PSE9 genomic DNA
cattgcgccgaggatctgct

SEQ ID NO: 248 - DNA, 20 bp, Artificial
  Primer used in screening the fosmid library of PSE9 genomic DNA
cggtcgatattgcacgccag

SEQ ID NO: 249 - DNA, 20 bp, Artificial
  Primer used in screening the fosmid library of PSE9 genomic DNA
atcgctctgcctcgcccatt

SEQ ID NO: 250 - DNA, 22 bp, Artificial
  Primer used in screening the fosmid library of PSE9 genomic DNA
tgctgctgtcgggtattacctt

SEQ ID NO: 251 - DNA, 22 bp, Artificial
  Primer used in screening the fosmid library of PSE9 genomic DNA
cccctaaccgacatccctaaca

SEQ ID NO: 252 - DNA, 20 bp, Artificial
  Primer used in screening the fosmid library of PSE9 genomic DNA
tcgtagcggtagcgaacgga

SEQ ID NO: 253 - DNA, 20 bp, Artificial
  Primer used in screening the fosmid library of PSE9 genomic DNA
accagcaaggtcgacgccaa

SEQ ID NO: 254 - DNA, 21 bp, Artificial
  Primer used in screening the fosmid library of PSE9 genomic DNA
gaacgcctcgaatacgacgtc

SEQ ID NO: 255 - DNA, 20 bp, Artificial
  Primer used in screening the fosmid library of PSE9 genomic DNA
ttgtcgcctactgccagggt

SEQ ID NO: 256 - DNA, 25 bp, Artificial
  Primer hybridizing to the borders of the transposon of the fosmid
acctacaacaaagctctcatcaacc

SEQ ID NO: 257 - DNA, 25 bp, Artificial
  Primer hybridizing to the borders of the transposon of the fosmid
gcaatgtaacatcagagattttgag

SEQ ID NO: 258 - DNA, 22 bp, Artificial
  Primer used to screen for gentamicin- and sucrose-resistant colonies
cgcagcagcaacgatgttacgc

SEQ ID NO: 259 - DNA, 20 bp, Artificial
  Primer used to screen for gentamicin- and sucrose-resistant colonies
cgcgttggcctcatgcttga

SEQ ID NO: 260 - DNA, 20 bp, Artificial
  Primer used to screen for gentamicin- and sucrose-resistant colonies
tcgaattcctccgcgagagc

SEQ ID NO: 261 - DNA, 20 bp, Artificial
  Primer used to screen for gentamicin- and sucrose-resistant colonies
aaatccatgcccggctcgtc

SEQ ID NO: 262 - DNA, 21 bp, Artificial
  Primer used to screen for gentamicin- and sucrose-resistant colonies
gcacgttgccagatgttctcc

SEQ ID NO: 263 - DNA, 20 bp, Artificial
  Primer used to screen for gentamicin- and sucrose-resistant colonies
ggcagaaatggctgcgttcg

SEQ ID NO: 264 - DNA, 21 bp, Artificial
  Primer used to screen for gentamicin- and sucrose-resistant colonies
cgattcaagcgagccaggatc

SEQ ID NO: 265 - DNA, 22 bp, Artificial
  Primer used to screen for gentamicin- and sucrose-resistant colonies
gccaccacgttgacaacaagct

SEQ ID NO: 266 - DNA, 21 bp, Artificial
  Primers used in screening the fosmid library
agaatttgacatgttgcagcg

SEQ ID NO: 267 - DNA, 21 bp, Artificial
  Primers used in screening the fosmid library
agcttgctctcggtcaatctc

SEQ ID NO: 268 - DNA, 21 bp, Artificial
  Primers used in screening the fosmid library
taccctatgaccatgcccatt

SEQ ID NO: 269 - DNA, 19 bp, Artificial
  Primers used in screening the fosmid library
tcaaccccgaacagcctga

SEQ ID NO: 270 - DNA, 19 bp, Artificial
  Primers used in screening the fosmid library
acttgtagaccaggtgcgg

SEQ ID NO: 271 - DNA, 20 bp, Artificial
  Primers used in screening the fosmid library
tggatcatcactgaggcaga
